(19) United States
(12) Patent Application Publication
(10) Pub. No.: US 2021/0380692 A1
(43) Pub. Date: Dec. 9, 2021

(54) ANTI-TCR ANTIBODY MOLECULES AND USES THEREOF

(71) Applicant: Marengo Therapeutics, Inc., Cambridge, MA (US)

(72) Inventors: Andreas Loew, Boston, MA (US); Seng-Lai Tan, Sudbury, MA (US); Jonathan Hsu, Waltham, MA (US); Brian Edward Vash, Cambridge, MA (US)

(21) Appl. No.: 17/402,322

(22) Filed: Aug. 13, 2021

Related U.S. Application Data
(63) Continuation of application No. PCT/US2020/019319, filed on Feb. 21, 2020.
(60) Provisional application No. 62/808,784, filed on Feb. 21, 2019.
(60) Provisional application No. 62/956,871, filed on Jan. 3, 2020.

(51) Int. Cl. C07K 16/28; G01N 33/68; A61K 35/17; C12N 5/0783

(52) U.S. Cl. CPC C07K 16/2809; G01N 33/6893; A61K 35/17; C12N 5/0636; G01N 2800/26; C07K 2317/24; C07K 2317/74; G01N 2333/7051; C07K 2317/75

(57) ABSTRACT

The disclosure provides antibody molecules that bind to TCR Vβ regions and multispecific molecules comprising said antibody molecules. Additionally, disclosed are nucleic acids encoding the same, methods of producing the aforesaid molecules, pharmaceutical compositions comprising aforesaid molecules, and methods of treating an infectious disease using the aforesaid molecules.

### RELATED APPLICATIONS

[0001] This application is a continuation of International Application No. PCT/US2020/019319, filed on Feb. 21, 2020, which claims the benefit of U.S. Provisional Application 62/808,784 filed on Feb. 21, 2019 and U.S. Provisional Application 62/956,871 filed on Jan. 3, 2020, the entire contents of each of which are hereby incorporated by reference.

### SEQUENCE LISTING

[0002] The instant application contains a Sequence Listing which has been submitted electronically in ASCII format and is hereby incorporated by reference in its entirety. Said ASCII copy, created on Feb. 17, 2020, is named 53676-733.301 SL.txt and is 1,080,059 bytes in size.

### BACKGROUND

[0003] T cell mediated antigen recognition depends on the interaction of the T-cell receptor (TCR) with the antigen-major histocompatibility complex (MHC). The heterodimeric TCRs consist of a combination of α and β chains (αβ TCR) expressed by the majority of T cells, or γδ chains (γδ TCR) present only in about 1-5% of the T cells. A highly diverse TCR repertoire is a fundamental property of an effective immune system. However, it is now understood that the immune repertoire can change greatly with the onset and progression of infectious diseases. Thus, there exists a need in the art for improved strategies for treating infectious diseases by harnessing differences in the immune repertoire.

### SUMMARY OF THE INVENTION

[0004] Disclosed herein are, inter alfa, methods of using antibodies directed to the variable chain of the beta subunit of TCR (TCRβV) which bind and, e.g., activate, T cells, e.g., a subset of T cells, to treat infectious diseases. Generally, the invention features a method of expanding, e.g., increasing the number of, a T cell population comprising a TCRβV molecule (e.g., as described herein), the method comprising: contacting the T cell population with an antibody molecule, e.g., humanized antibody molecule, which binds, e.g., specifically binds, to a T cell receptor beta variable chain (TCRβV) region (e.g., an anti-TCRβV antibody molecule), thereby expanding the T cell population. In some embodiments, the T cell population is obtained from or comprised in a subject, e.g., a subject having an infectious disease (e.g., as described herein). Without wishing to be bound by theory, in some embodiments, the TCRβV clonotype bound by the antibody molecule does not have to be the particular TCRβV clonotype that is over-represented, e.g., that shows a higher level or activity, in the subject having the infectious disease.

### Enumerated Embodiments

[0005] 1. A method of expanding, e.g., increasing the number of, a T cell population comprising a TCRβV molecule (e.g., as described herein), the method comprising: contacting the T cell population with an antibody molecule, e.g., humanized antibody molecule, which binds, e.g., specifically binds, to a T cell receptor beta variable chain (TCRβV) region, thereby expanding the T cell population, wherein the T cell population is obtained from or comprised in a subject having an infectious disease.

[0006] 2. A method of treating a subject having an infectious disease, the method comprising administering an effective amount of an anti-TCRβV antibody molecule (e.g., a TCRβV agonist) to the subject, thereby treating the infectious disease.

[0007] 3. A method of evaluating, e.g., identifying the level or activity of a TCRβV molecule in a subject having an infectious disease, the method comprising acquiring a status for the TCRβV molecule in the subject; wherein the level or activity of the TCRβV molecule is higher (e.g., at least about 1.1, 1.2, 1.3, 1.4, 1.5, 2, 3, 4, 5, 6, 7, 8, 9, 10, 20, 30, 40, 50, 60, 70, 80, 90, 100, 200, 300, 400, 500, 600, 700, 800, 900, 1000, 5000, 10,000, or 100,000-fold higher) relative to the level or activity of the TCRβV molecule in a healthy subject (e.g., a subject that does not have the infectious disease).

[0008] 4. A method of treating a subject having an infectious disease, the method comprising:
[0009] (i) acquiring a status for the TCRβV molecule in the subject; and
[0010] (ii) administering an effective amount of an anti-TCRβV antibody molecule (e.g., a TCRβV agonist) to the subject, thereby treating the infectious disease;
[0011] wherein the level or activity of the TCRβV molecule is higher (e.g., at least about 1.1, 1.2, 1.3, 1.4, 1.5, 2, 3, 4, 5, 6, 7, 8, 9, 10, 20, 30, 40, 50, 60, 70, 80, 90, 100, 200, 300, 400, 500, 600, 700, 800, 900, 1000, 5000, 10,000, or 100,000-fold higher) relative to the level or activity of the TCRβV molecule in a healthy subject (e.g., a subject that does not have the infectious disease).

[0012] 5. A method of evaluating a subject for the presence of an infectious disease, the method comprising:
[0013] (i) acquiring a status for one or more TCRβV molecules in a biological sample from the subject and in a biological sample from a healthy subject (e.g., a subject that does not have the infectious disease); and
[0014] (ii) determining whether one or more of the TCRβV molecules exhibits an elevated level or activity in the subject relative to the healthy subject; wherein an elevated level or activity in the subject relative to in the healthy subject is indicative of the presence of the infectious disease.

[0015] 6. A method of treating a subject having an infectious disease, the method comprising:
[0016] (i) acquiring a status for one or more TCRβV molecules in a biological sample from the subject and in a biological sample from a healthy subject (e.g., a subject that does not have the infectious disease);
[0017] (ii) determining whether one or more of the TCRβV molecules exhibits an elevated level or activity in the subject relative to the healthy subject; and
[0018] (iii) if an elevated level or activity in the subject relative to in the healthy subject is determined, administering an effective amount of an anti-TCRβV antibody molecule (e.g., a TCRβV agonist) to the subject.

[0019] 7. The method of any of the preceding embodiments, wherein the status is indicative of the subject having the infectious disease or a symptom thereof.

[0020] 8. The method of any of the preceding embodiments, wherein the status is indicative of responsiveness to a therapy, e.g., a TCRβV molecule.

[0021] 9. The method of any of the preceding embodiments, wherein the status is determined, e.g., measured, by an assay described herein.

[0022] 10. The method of any of the preceding embodiments, wherein the acquiring comprises: isolating a biological sample from the subject, contacting the biological sample with an anti-TCRβV antibody molecule (e.g., the same anti-TCRβV antibody molecule or a different anti-TCRβV antibody molecule), and determining a level of T cell expansion in the biological sample, e.g., relative to the level of T cell expansion in a biological sample obtained from a healthy subject (e.g., a subject that does not have the infectious disease).

[0023] 11. The method of embodiment 10, further comprising administering expanded T cells from the biological sample to the subject.

[0024] 12. The method of any of the preceding embodiments, wherein the acquiring comprises: isolating a biological sample from the subject, contacting the biological sample with an anti-TCRβV antibody molecule (e.g., the same anti-TCRβV antibody molecule or a different anti-TCRβV antibody molecule), and determining a level of T cell function (e.g., cytotoxic activity) in the biological sample, e.g., relative to the level of T cell expansion in a biological sample obtained from a healthy subject (e.g., a subject that does not have the infectious disease).

[0025] 13. A method of identifying one or more TCRβV molecules associated with a disease, the method comprising:
[0026] (i) acquiring a status for a plurality of TCRβV molecules in a biological sample from a first subject having the disease and in a biological sample from a second subject not having the disease; and
[0027] (ii) determining whether one or more of the TCRβV molecules exhibits an elevated level or activity in the first subject relative to the second subject; thereby identifying one or more TCRβV molecules associated with the disease.

[0028] 14. The method of any of the preceding embodiments, wherein the infectious disease is selected from Epstein-Barr virus (EBV), influenza, human immunodeficiency virus (HIV), simian immunodeficiency virus (SIV), tuberculosis, malaria, or human cytomegalovirus (HCMV).

[0029] 15. The method of any of the preceding embodiments, wherein the TCRβV is selected from TCRβV V5-6, TCRβV V6-5, TCRβV V7, TCRβV V9, TCRβV V10, TCRβV V12 (e.g., TCRβV V12-4), TCRβV V13, TCRβV V14, TCRβV V19, TCRβV V23-1, or a subfamily member thereof (e.g., as listed in Table 1 or Table 2).

[0030] 16. The method of any of the preceding embodiments, wherein the anti-TCRβV antibody molecule induces expansion, e.g., increasing the number of, a T cell population comprising a TCRβV molecule (e.g., the TCRβV bound by the anti-TCRβV antibody molecule).

[0031] 17. The method of embodiment 16, wherein the T cell population comprises CD4 T cells, CD8 T cells, or CD3 T cells.

[0032] 18. The method of embodiment 16, wherein the T cell population derived from peripheral blood.

[0033] 19. The method of any of the preceding embodiments, wherein the anti-TCRβV antibody molecule comprises: (1) a heavy chain complementarity determining region (HC CDR1), a HC CDR2 and/or a HC CDR3 of SEQ ID NO: 3, SEQ ID NO: 4, and/or SEQ ID NO: 5; and/or (2) a light chain complementarity determining region 1 (LC CDR1), a LC CDR2, and/or a LC CDR3 of SEQ ID NO: 6, SEQ ID NO: 7, and/or SEQ ID NO: 8.

[0034] 20. The method of any of the preceding embodiments, wherein the anti-TCRβV antibody molecule comprises: (1) a heavy chain complementarity determining region (HC CDR1), a HC CDR2 and/or a HC CDR3 of SEQ ID NO: 45, SEQ ID NO: 46, and/or SEQ ID NO: 47; and/or (2) a light chain complementarity determining region 1 (LC CDR1), a LC CDR2, and/or a LC CDR3 of SEQ ID NO: 51, SEQ ID NO: 52, and/or SEQ ID NO: 53.

[0035] 21. The method of any of the preceding embodiments, wherein the anti-TCRβV antibody molecule comprises: (1) a heavy chain complementarity determining region (HC CDR1), a HC CDR2 and/or a HC CDR3 of SEQ ID NO: 48, SEQ ID NO: 49, and/or SEQ ID NO: 50; and/or (2) a light chain complementarity determining region 1 (LC CDR1), a LC CDR2, and/or a LC CDR3 of SEQ ID NO: 54, SEQ ID NO: 55, and/or SEQ ID NO: 56.

[0036] 22. The method of any of the preceding embodiments, wherein the anti-TCRβV antibody molecule comprises: (1) a heavy chain complementarity determining region (HC CDR1), a HC CDR2 and/or a HC CDR3 of SEQ ID NO: 17, SEQ ID NO: 18, and/or SEQ ID NO: 19; and/or (2) a light chain complementarity determining region 1 (LC CDR1), a LC CDR2, and/or a LC CDR3 of SEQ ID NO: 20, SEQ ID NO: 21, and/or SEQ ID NO: 22.

[0037] 23. The method of any of the preceding embodiments, wherein the anti-TCRβV antibody molecule comprises: (1) a heavy chain complementarity determining region (HC CDR1), a HC CDR2 and/or a HC CDR3 of SEQ ID NO: 57, SEQ ID NO: 58, and/or SEQ ID NO: 59; and/or (2) a light chain complementarity determining region 1 (LC CDR1), a LC CDR2, and/or a LC CDR3 of SEQ ID NO: 63, SEQ ID NO: 64, and/or SEQ ID NO: 65.

[0038] 24. The method of any of the preceding embodiments, wherein the anti-TCRβV antibody molecule comprises: (1) a heavy chain complementarity determining region (HC CDR1), a HC CDR2 and/or a HC CDR3 of SEQ ID NO: 60, SEQ ID NO: 61, and/or SEQ ID NO: 62; and/or (2) a light chain complementarity determining region 1 (LC CDR1), a LC CDR2, and/or a LC CDR3 of SEQ ID NO: 66, SEQ ID NO: 67, and/or SEQ ID NO: 68.

[0039] 25. The method of any of the preceding embodiments, wherein the anti-TCRβV antibody molecule comprises a VH having at least 85% (e.g., at least 85%, 90%, 95%, 96%, 97%, 98%, 99%, or 100%) sequence identity to SEQ ID NO: 9.

[0040] 26. The method of any of the preceding embodiments, wherein the anti-TCRβV antibody molecule comprises a VL having at least 85% (e.g., at least 85%, 90%, 95%, 96%, 97%, 98%, 99%, or 100%) sequence identity to SEQ ID NO: 10.

[0041] 27. The method of any of the preceding embodiments, wherein the anti-TCRβV antibody molecule comprises a VH having at least 85% (e.g., at least 85%, 90%, 95%, 96%, 97%, 98%, 99%, or 100%) sequence identity to SEQ ID NO: 9 and a VL having at least X % sequence identity to SEQ ID NO: 10.

[0042] 28. The method of any of the preceding embodiments, wherein the anti-TCRβV antibody molecule comprises a heavy chain having at least 85% (e.g., at least 85%, 90%, 95%, 96%, 97%, 98%, 99%, or 100%) sequence identity to SEQ ID NO: 69.

[0043] 29. The method of any of the preceding embodiments, wherein the anti-TCRβV antibody molecule comprises a heavy chain having at least 85% (e.g., at least 85%, 90%, 95%, 96%, 97%, 98%, 99%, or 100%) sequence identity to SEQ ID NO: 70.

[0044] 30. The method of any of the preceding embodiments, wherein the anti-TCRβV antibody molecule comprises a heavy chain having at least 85% (e.g., at least 85%, 90%, 95%, 96%, 97%, 98%, 99%, or 100%) sequence identity to SEQ ID NO: 71.

[0045] 31. The method of any of the preceding embodiments, wherein the anti-TCRβV antibody molecule comprises a light chain having at least 85% (e.g., at least 85%, 90%, 95%, 96%, 97%, 98%, 99%, or 100%) sequence identity to SEQ ID NO: 72.

[0046] 32. The method of any of the preceding embodiments, wherein the anti-TCRβV antibody molecule comprises a heavy chain having at least 85% (e.g., at least 85%, 90%, 95%, 96%, 97%, 98%, 99%, or 100%) sequence identity to SEQ ID NO: 69 and a light chain having at least 85% (e.g., at least 85%, 90%, 95%, 96%, 97%, 98%, 99%, or 100%) sequence identity to SEQ ID NO: 72.

[0047] 33. The method of any of the preceding embodiments, wherein the anti-TCRβV antibody molecule comprises a heavy chain having at least 85% (e.g., at least 85%, 90%, 95%, 96%, 97%, 98%, 99%, or 100%) sequence identity to SEQ ID NO: 70 and a light chain having at least 85% (e.g., at least 85%, 90%, 95%, 96%, 97%, 98%, 99%, or 100%) sequence identity to SEQ ID NO: 72.

[0048] 34. The method of any of the preceding embodiments, wherein the anti-TCRβV antibody molecule comprises a heavy chain having at least 85% (e.g., at least 85%, 90%, 95%, 96%, 97%, 98%, 99%, or 100%) sequence identity to SEQ ID NO: 71 and a light chain having at least 85% (e.g., at least 85%, 90%, 95%, 96%, 97%, 98%, 99%, or 100%) sequence identity to SEQ ID NO: 72.

[0049] 35. The method of any of the preceding embodiments, wherein the anti-TCRβV antibody molecule is co-expressed with an IgJ chain (e.g., an IgJ chain comprising at least 85%, 90%, 95%, 96%, 97%, 98%, 99%, or 100% sequence identity to SEQ ID NO: 76).

[0050] 36. The method of any of the preceding embodiments, wherein the anti-TCRβV antibody molecule comprises a heavy chain having at least 85% (e.g., at least 85%, 90%, 95%, 96%, 97%, 98%, 99%, or 100%) sequence identity to SEQ ID NO: 69 and a light chain having at least 85% (e.g., at least 85%, 90%, 95%, 96%, 97%, 98%, 99%, or 100%) sequence identity to SEQ ID NO: 72; and wherein the anti-TCRβV antibody molecule is co-expressed with an IgJ chain (e.g., an IgJ chain comprising at least 85%, 90%, 95%, 96%, 97%, 98%, 99%, or 100% sequence identity to SEQ ID NO: 76).

[0051] 37. The method of any of the preceding embodiments, wherein the anti-TCRβV antibody molecule comprises a VH having at least 85% (e.g., at least 85%, 90%, 95%, 96%, 97%, 98%, 99%, or 100%) sequence identity to SEQ ID NO: 15.

[0052] 38. The method of any of the preceding embodiments, wherein the anti-TCRβV antibody molecule comprises a VL having at least 85% (e.g., at least 85%, 90%, 95%, 96%, 97%, 98%, 99%, or 100%) sequence identity to SEQ ID NO: 16.

[0053] 39. The method of any of the preceding embodiments, wherein the anti-TCRβV antibody molecule comprises a VH having at least 85% (e.g., at least 85%, 90%, 95%, 96%, 97%, 98%, 99%, or 100%) sequence identity to SEQ ID NO: 23.

[0054] 40. The method of any of the preceding embodiments, wherein the anti-TCRβV antibody molecule comprises a VH having at least 85% (e.g., at least 85%, 90%, 95%, 96%, 97%, 98%, 99%, or 100%) sequence identity to SEQ ID NO: 24.

[0055] 41. The method of any of the preceding embodiments, wherein the anti-TCRβV antibody molecule comprises a VH having at least 85% (e.g., at least 85%, 90%, 95%, 96%, 97%, 98%, 99%, or 100%) sequence identity to SEQ ID NO: 25.

[0056] 42. The method of any of the preceding embodiments, wherein the anti-TCRβV antibody molecule comprises a VL having at least 85% (e.g., at least 85%, 90%, 95%, 96%, 97%, 98%, 99%, or 100%) sequence identity to SEQ ID NO: 26.

[0057] 43. The method of any of the preceding embodiments, wherein the anti-TCRβV antibody molecule comprises a VL having at least 85% (e.g., at least 85%, 90%, 95%, 96%, 97%, 98%, 99%, or 100%) sequence identity to SEQ ID NO: 27.

[0058] 44. The method of any of the preceding embodiments, wherein the anti-TCRβV antibody molecule comprises a VL having at least 85% (e.g., at least 85%, 90%, 95%, 96%, 97%, 98%, 99%, or 100%) sequence identity to SEQ ID NO: 28.

[0059] 45. The method of any of the preceding embodiments, wherein the anti-TCRβV antibody molecule comprises a VL having at least 85% (e.g., at least 85%, 90%, 95%, 96%, 97%, 98%, 99%, or 100%) sequence identity to SEQ ID NO: 29.

[0060] 46. The method of any of the preceding embodiments, wherein the anti-TCRβV antibody molecule comprises a VL having at least 85% (e.g., at least 85%, 90%, 95%, 96%, 97%, 98%, 99%, or 100%) sequence identity to SEQ ID NO: 30.

[0061] 47. The method of any of the preceding embodiments, wherein the anti-TCRβV antibody molecule comprises a VH amino acid sequence as listed in Table 3 or Table 4, and/or a VL amino acid sequence as listed in Table 3 or Table 4.

[0062] 48. The method of any of the preceding embodiments, wherein the anti-TCRβV antibody molecule selectively or preferentially expands αβ T cels over y6 T cells.

[0063] 49. The method of any of the preceding embodiments, wherein the anti-TCRβV antibody molecule does not induce cytokine release syndrome (CRS).

[0064] 50. The method of any of the preceding embodiments, wherein binding of the anti-TCRβV antibody molecule to the TCRβV region results in one, two, three, four, five, six, seven, eight, nine, ten or more (e.g., all) of the following:
[0065] (i) reduced level, e.g., expression level, and/or activity of IL-1β;
[0066] (ii) reduced level, e.g., expression level, and/or activity of IL-6;
[0067] (iii) reduced level, e.g., expression level, and/or activity of TNFα;
[0068] (iv) increased level, e.g., expression level, and/or activity of IL-2;
[0069] (v) a delay, e.g., at least 1, 2, 3, 4, 5, 6, 7, 8, 9, 10 or more hours delay, in increased level, e.g., expression level, and/or activity of IL-2;
[0070] (vi) a delay, e.g., at least 1, 2, 3, 4, 5, 6, 7, 8, 9, 10 hours delay, in increased level, e.g., expression level, and/or activity of IFNγ;
[0071] (vii) reduced T cell proliferation kinetics; or
[0072] (viii) reduced cytokine storm, e.g., cytokine release syndrome (CRS), e.g., as measured by an assay of Example 3;
[0073] (ix) cell killing, e.g., target cell killing,
[0074] (x) increased level, e.g., expression level, and/or activity of IL-15; or
[0075] (xi) increased Natural Killer (NK) cell proliferation, e.g., expansion, compared to an antibody that binds to: a CD3 molecule, e.g., CD3 epsilon (CD3e) molecule; or a TCR alpha (TCRα) molecule,
[0076] wherein the anti-TCRβV antibody molecule:
[0077] (1) does not bind to TCRβ V12, TCRβ V5-5*01 or TCRβ V5-1*01;
[0078] (2) binds to TCRβ V12 with an affinity and/or binding specificity that is less than (e.g., less than about 10%, 20%, 30%, 40%, 50%, 60%, 70%, 80%, 90% or about 2-, 5-, or 10-fold) the affinity and/or binding specificity of the murine mAb Antibody B; and/or
[0079] (3) binds to TCRβ V5-5*01 TCRβ V5-1*01 or with an affinity and/or binding specificity that is less than (e.g., less than about 10%, 20%, 30%, 40%, 50%, 60%, 70%, 80%, 90% or about 2-, 5-, or 10-fold) the affinity and/or binding specificity of murine Antibody C.

[0080] 51. The method of any of the preceding embodiments, wherein binding of the anti-TCRβV antibody molecule to the TCRβV region results in expansion, e.g., at least about 1.1-10 fold expansion (e.g., at least about 1.1, 1.2, 1.3, 1.4, 1.5, 2, 3, 4, 5, 6, 7, 8, 9, or 10 fold expansion), of a population of memory T cells, e.g., T effector memory (T_{EM}) cells, e.g., T_{EM} cells expressing CD45RA (T_{EMRA}) cells, wherein the anti-TCRβV antibody molecule:
[0081] (1) does not bind to TCRβ V12, TCRβ V5-5*01 or TCRβ V5-1*01;
[0082] (2) binds to TCRβ V12 with an affinity and/or binding specificity that is less than (e.g., less than about 10%, 20%, 30%, 40%, 50%, 60%, 70%, 80%, 90% or about 2-, 5-, or 10-fold) the affinity and/or binding specificity of the murine mAb Antibody B; and/or
[0083] (3) binds to TCRβ V5-5*01 TCRβ V5-1*01or with an affinity and/or binding specificity that is less than (e.g., less than about 10%, 20%, 30%, 40%, 50%, 60%, 70%, 80%, 90% or about 2-, 5-, or 10-fold) the affinity and/or binding specificity of murine Antibody C.

[0084] 52. The method of any of the preceding embodiments, wherein binding of the anti-TCRβV antibody molecule to a TCRβV region results in a reduction of at least 2, 5, 10, 20, 50, 100, or 200 fold, or at least 2-200 fold (e.g., 5-150, 10-100, 20-50 fold) in the expression level and or activity of IL-1β as measured by an assay of Example 3.

[0085] 53. The method of any of the preceding embodiments, wherein binding of the anti-TCRβV antibody molecule to a TCRβV region results in a reduction of at least 2, 5, 10, 20, 50, 100, 200, 300, 400, 500, 600, 700, 800, 900, or 1000 fold, or at least 2-1000 fold (e.g., 5-900, 10-800, 20-700, 50-600, 100-500, or 200-400 fold) in the expression level and or activity of IL-6 as measured by an assay of Example 3.

[0086] 54. The method of any of the preceding embodiments, wherein binding of the anti-TCRβV antibody molecule to a TCRβV region results in a reduction of at least 2, 5, 10, 20, 50, 100, 200, 300, 400, 500, 600, 700, 800, 900, 1000, or 2000 fold, or at least 2-2000 fold (e.g., 5-1000, 10-900, 20-800, 50-700, 100-600, 200-500, or 300-400 fold) in the expression level and or activity of TNFα as measured by an assay of Example 3.

[0087] 55. The method of any of the preceding embodiments, wherein binding of the anti-TCRβV antibody molecule to a TCRβV region results in an increase of at least 2, 5, 10, 20, 50, 100, 200, 300, 400, 500, 600, 700, 800, 900, 1000, or 2000 fold, or at least 2-2000 fold (e.g., 5-1000, 10-900, 20-800, 50-700, 100-600, 200-500, or 300-400 fold) in the expression level and or activity of IL-2 as measured by an assay of Example 3.

[0088] 56. The method of any of the preceding embodiments, wherein the anti-TCRβV antibody molecule binds to one or more (e.g., all) of the following TCRβV subfamilies:
[0089] (i) TCRβ V6 subfamily comprising, e.g., TCRβ V6-4*01, TCRβ V6-4*02, TCRβ V6-9*01, TCRβ V6-8*01, TCRβ V6-5*01, TCRβ V6-6*02, TCRβ V6-6*01, TCRβ V6-2*01, TCRβ V6-3*01 or TCRβ V6-1*01;
[0090] (ii) TCRβ V10 subfamily comprising, e.g., TCRβ V10-1*01, TCRβ V10-1*02, TCRβ V10-3*01 or TCRβ V10-2*01;
[0091] (iii) TCRβ V12 subfamily comprising, e.g., TCRβ V12-4*01, TCRβ V12-3*01, or TCRβ V12-5*01;
[0092] (iv) TCRβ V5 subfamily comprising, e.g., TCRβ V5-5*01, TCRβ V5-6*01, TCRβ V5-4*01, TCRβ V5-8*01, or TCRβ V5-1*01;
[0093] (v) TCRβ V7 subfamily comprising, e.g., TCRβ V7-7*01, TCRβ V7-6*01, TCRβ V7-8*02, TCRβ V7-4*01, TCRβ V7-2*02, TCRβ V7-2*03, TCRβ V7-2*01, TCRβ V7-3*01, TCRβ V7-9*03, or TCRβ V7-9*01;
[0094] (vi) TCRβ V11 subfamily comprising, e.g., TCRβ V11-1*01, TCRβ V11-2*01 or TCRβ V11-3*01;
[0095] (vii) TCRβ V14 subfamily comprising, e.g., TCRβ V14*01;
[0096] (viii) TCRβ V16 subfamily comprising, e.g., TCRβ V16*01;
[0097] (ix) TCRβ V18 subfamily comprising, e.g., TCRβ V18*01;
[0098] (x) TCRβ V9 subfamily comprising, e.g., TCRβ V9*01 or TCRβ V9*02;
[0099] (xi) TCRβ V13 subfamily comprising, e.g., TCRβ V13*01;
[0100] (xii) TCRβ V4 subfamily comprising, e.g., TCRβ V4-2*01, TCRβ V4-3*01, or TCRβ V4-1*01;
[0101] (xiii) TCRβ V3 subfamily comprising, e.g., TCRβ V3-1*01;
[0102] (xiv) TCRβ V2 subfamily comprising, e.g., TCRβ V2*01;
[0103] (xv) TCRβ V15 subfamily comprising, e.g., TCRβ V15*01;
[0104] (xvi) TCRβ V30 subfamily comprising, e.g., TCRβ V30*01, or TCRβ V30*02;
[0105] (xvii) TCRβ V19 subfamily comprising, e.g., TCRβ V19*01, or TCRβ V19*02;
[0106] (xviii) TCRβ V27 subfamily comprising, e.g., TCRβ V27*01;
[0107] (xix) TCRβ V28 subfamily comprising, e.g., TCRβ V28*01;
[0108] (xx) TCRβ V24 subfamily comprising, e.g., TCRβ V24-1*01;
[0109] (xxi) TCRβ V20 subfamily comprising, e.g., TCRβ V20-1*01, or TCRβ V20-1*02;
[0110] (xxii) TCRβ V25 subfamily comprising, e.g., TCRβ V25-1*01;
[0111] (xxiii) TCRβ V29 subfamily comprising, e.g., TCRβ V29-1*01; or
[0112] (xxiv) TCRβ V23 subfamily comprising, e.g., TCRβ V23-1.

[0113] 57. The method of any of the preceding embodiments, wherein the anti-TCRβV antibody molecule binds to one or more (e.g., all) of the following TCRβV subfamilies:
[0114] (i) TCRβ V6 subfamily comprising, e.g., TCRβ V6-5*01;
[0115] (ii) TCRβ V10 subfamily comprising, e.g., TCRβ V10-1*01, TCRβ V10-1*02, TCRβ V10-3*01 or TCRβ V10-2*01;
[0116] (iii) TCRβ V12 subfamily comprising, e.g., TCRβ V12-4*01, TCRβ V12-3*01, or TCRβ V12-5*01;
[0117] (iv) TCRβ V5 subfamily comprising, e.g., TCRβ V5-6*01;
[0118] (v) TCRβ V7 subfamily comprising, e.g., TCRβ V7-7*01, TCRβ V7-6*01, TCRβ V7-8*02, TCRβ V7-4*01, TCRβ V7-2*02, TCRβ V7-2*03, TCRβ V7-2*01, TCRβ V7-3*01, TCRβ V7-9*03, or TCRβ V7-9*01;
[0119] (vi) TCRβ V14 subfamily comprising, e.g., TCRβ V14*01;
[0120] (vii) TCRβ V9 subfamily comprising, e.g., TCRβ V9*01 or TCRβ V9*02;
[0121] (viii) TCRβ V13 subfamily comprising, e.g., TCRβ V13*01;
[0122] (ix) TCRβ V19 subfamily comprising, e.g., TCRβ V19*01, or TCRβ V19*02; or
[0123] (x) TCRβ V23 subfamily comprising, e.g., TCRβ V23-1.

[0124] 58. The method of any of the preceding embodiments, wherein the infectious disease is SIV and the anti-TCRβV antibody molecule binds to the TCRβ V6 subfamily, e.g., comprising TCRβ V6-5*01.

[0125] 59. The method of embodiment 58, wherein the subject has a higher, e.g., increased, level or activity of a TCRβ V6 subfamily, e.g., comprising TCRβ V6-5*01.

[0126] 60. The method of any of the preceding embodiments, wherein the infectious disease is HCMV and the anti-TCRβV antibody molecule binds to the TCRβ V6 subfamily, e.g., comprising TCRβ V6-5*01.

[0127] 61. The method of embodiment 60, wherein the subject has a higher, e.g., increased, level or activity of a TCRβ V6 subfamily, e.g., comprising TCRβ V6-5*01.

[0128] 62. The method of any of embodiments 58-61, wherein the anti-TCRβV antibody molecule comprises:
[0129] (1) a heavy chain complementarity determining region (HC CDR1), a HC CDR2 and/or a HC CDR3 of SEQ ID NO: 3, SEQ ID NO: 4, and/or SEQ ID NO: 5; and/or
[0130] (2) a light chain complementarity determining region 1 (LC CDR1), a LC CDR2, and/or a LC CDR3 of SEQ ID NO: 6, SEQ ID NO: 7, and/or SEQ ID NO: 8.

[0131] 63. The method of any of embodiments 58-61, wherein the anti-TCRβV antibody molecule comprises:
[0132] (1) a heavy chain complementarity determining region (HC CDR1), a HC CDR2 and/or a HC CDR3 of SEQ ID NO: 45, SEQ ID NO: 46, and/or SEQ ID NO: 47; and/or
[0133] (2) a light chain complementarity determining region 1 (LC CDR1), a LC CDR2, and/or a LC CDR3 of SEQ ID NO: 51, SEQ ID NO: 52, and/or SEQ ID NO: 53.

[0134] 64. The method of any of embodiments 58-61, wherein the anti-TCRβV antibody molecule comprises:
[0135] (1) a heavy chain complementarity determining region (HC CDR1), a HC CDR2 and/or a HC CDR3 of SEQ ID NO: 48, SEQ ID NO: 49, and/or SEQ ID NO: 50; and/or
[0136] (2) a light chain complementarity determining region 1 (LC CDR1), a LC CDR2, and/or a LC CDR3 of SEQ ID NO: 54, SEQ ID NO: 55, and/or SEQ ID NO: 56.

[0137] 65. The method of any of embodiments 58-64, wherein the anti-TCRβV antibody molecule comprises a VH having at least 85% (e.g., at least 85%, 90%, 95%, 96%, 97%, 98%, 99%, or 100%) sequence identity to SEQ ID NO: 9.

[0138] 66. The method of any of embodiments 58-65, wherein the anti-TCRβV antibody molecule comprises a VL having at least 85% (e.g., at least 85%, 90%, 95%, 96%, 97%, 98%, 99%, or 100%) sequence identity to SEQ ID NO: 10.

[0139] 67. The method of any of embodiments 58-64, wherein the anti-TCRβV antibody molecule comprises a VH having at least 85% (e.g., at least 85%, 90%, 95%, 96%, 97%, 98%, 99%, or 100%) sequence identity to SEQ ID NO: 9 and a VL having at least X % sequence identity to SEQ ID NO: 10.

[0140] 68. The method of any of embodiments 58-67, wherein the anti-TCRβV antibody molecule comprises a heavy chain having at least 85% (e.g., at least 85%, 90%, 95%, 96%, 97%, 98%, 99%, or 100%) sequence identity to SEQ ID NO: 69 and a light chain having at least 85% (e.g., at least 85%, 90%, 95%, 96%, 97%, 98%, 99%, or 100%) sequence identity to SEQ ID NO: 72.

[0141] 69. The method of any of the preceding embodiments, wherein the infectious disease is EBV and the anti-TCRβV antibody molecule binds to the TCRβ V10 subfamily, e.g., comprising TCRβ V10-1*01, TCRβ V10-1*02, TCRβ V10-3*01 or TCRβ V10-2*01.

[0142] 70. The method of embodiment 69, wherein the antigen is BZLF1(52-64).

[0143] 71. The method of embodiment 69 or 70, wherein the MHC restriction is HLA-B*3508.

[0144] 72. The method of any of embodiments 69-71, wherein the subject has a higher, e.g., increased, level or activity of a TCRβ V10 subfamily, e.g., comprising TCRβ V10-1*01, TCRβ V10-1*02, TCRβ V10-3*01 or TCRβ V10-2*01.

[0145] 73. The method of any of the preceding embodiments, wherein the infectious disease is malaria and the anti-TCRβV antibody molecule binds to the TCRβ V12 subfamily, e.g., comprising TCRβ V12-4*01, TCRβ V12-3*01, or TCRβ V12-5*01.

[0146] 74. The method of embodiment 73, wherein the subject has a higher, e.g., increased, level or activity of a TCRβ V12 subfamily, e.g., comprising TCRβ V12-4*01, TCRβ V12-3*01, or TCRβ V12-5*01.

[0147] 75. The method of any of the preceding embodiments, wherein the infectious disease is tuberculosis and the anti-TCRβV antibody molecule binds to the TCRβ V12 subfamily, e.g., comprising TCRβ V12-4*01, TCRβ V12-3*01, or TCRβ V12-5*01.

[0148] 76. The method of embodiment 75, wherein the subject has a higher, e.g., increased, level or activity of a TCRβ V12 subfamily, e.g., comprising TCRβ V12-4*01, TCRβ V12-3*01, or TCRβ V12-5*01.

[0149] 77. The method of any of the preceding embodiments, wherein the infectious disease is HCMV and the anti-TCRβV antibody molecule binds to the TCRβ V12 subfamily, e.g., comprising TCRβ V12-4*01.

[0150] 78. The method of embodiment 77, wherein the subject has a higher, e.g., increased, level or activity of a TCRβ V12 subfamily, e.g., comprising TCRβ V12-4*01.

[0151] 79. The method of any of embodiments 73-78, wherein the anti-TCRβV antibody molecule comprises:
[0152] (1) a heavy chain complementarity determining region (HC CDR1), a HC CDR2 and/or a HC CDR3 of SEQ ID NO: 17, SEQ ID NO: 18, and/or SEQ ID NO: 19; and/or
[0153] (2) a light chain complementarity determining region 1 (LC CDR1), a LC CDR2, and/or a LC CDR3 of SEQ ID NO: 20, SEQ ID NO: 21, and/or SEQ ID NO: 22.

[0154] 80. The method of any of embodiments 73-78, wherein the anti-TCRβV antibody molecule comprises:
[0155] (1) a heavy chain complementarity determining region (HC CDR1), a HC CDR2 and/or a HC CDR3 of SEQ ID NO: 57, SEQ ID NO: 58, and/or SEQ ID NO: 59; and/or
[0156] (2) a light chain complementarity determining region 1 (LC CDR1), a LC CDR2, and/or a LC CDR3 of SEQ ID NO: 63, SEQ ID NO: 64, and/or SEQ ID NO: 65.

[0157] 81. The method of any of embodiments 73-78, wherein the anti-TCRβV antibody molecule comprises:
[0158] (1) a heavy chain complementarity determining region (HC CDR1), a HC CDR2 and/or a HC CDR3 of SEQ ID NO: 60, SEQ ID NO: 61, and/or SEQ ID NO: 62; and/or
[0159] (2) a light chain complementarity determining region 1 (LC CDR1), a LC CDR2, and/or a LC CDR3 of SEQ ID NO: 66, SEQ ID NO: 67, and/or SEQ ID NO: 68.

[0160] 82. The method of any of embodiments 73-81, wherein the anti-TCRβV antibody molecule comprises a VH having at least 85% (e.g., at least 85%, 90%, 95%, 96%, 97%, 98%, 99%, or 100%) sequence identity to SEQ ID NO: 15.

[0161] 83. The method of any of embodiments 73-82, wherein the anti-TCRβV antibody molecule comprises a VL having at least 85% (e.g., at least 85%, 90%, 95%, 96%, 97%, 98%, 99%, or 100%) sequence identity to SEQ ID NO: 16,
[0162] optionally wherein the anti-TCRβV antibody molecule comprises a VH having at least 85% (e.g., at least 85%, 90%, 95%, 96%, 97%, 98%, 99%, or 100%) sequence identity to SEQ ID NO: 15 and a VL having at least 85% (e.g., at least 85%, 90%, 95%, 96%, 97%, 98%, 99%, or 100%) sequence identity to SEQ ID NO: 16.

[0163] 84. The method of any of embodiments 73-81, wherein the anti-TCRβV antibody molecule comprises a VH having at least 85% (e.g., at least 85%, 90%, 95%, 96%, 97%, 98%, 99%, or 100%) sequence identity to SEQ ID NO: 23.

[0164] 85. The method of any of embodiments 73-81, wherein the anti-TCRβV antibody molecule comprises a VH having at least 85% (e.g., at least 85%, 90%, 95%, 96%, 97%, 98%, 99%, or 100%) sequence identity to SEQ ID NO: 24.

[0165] 86. The method of any of embodiments 73-81, wherein the anti-TCRβV antibody molecule comprises a VH having at least 85% (e.g., at least 85%, 90%, 95%, 96%, 97%, 98%, 99%, or 100%) sequence identity to SEQ ID NO: 25.

[0166] 87. The method of any of embodiments 73-86, wherein the anti-TCRβV antibody molecule comprises a VL having at least 85% (e.g., at least 85%, 90%, 95%, 96%, 97%, 98%, 99%, or 100%) sequence identity to SEQ ID NO: 26.

[0167] 88. The method of any of embodiments 73-86, wherein the anti-TCRβV antibody molecule comprises a VL having at least 85% (e.g., at least 85%, 90%, 95%, 96%, 97%, 98%, 99%, or 100%) sequence identity to SEQ ID NO: 27.

[0168] 89. The method of any of embodiments 73-86, wherein the anti-TCRβV antibody molecule comprises a VL having at least 85% (e.g., at least 85%, 90%, 95%, 96%, 97%, 98%, 99%, or 100%) sequence identity to SEQ ID NO: 28.

[0169] 90. The method of any of embodiments 73-86, wherein the anti-TCRβV antibody molecule comprises a VL having at least 85% (e.g., at least 85%, 90%, 95%, 96%, 97%, 98%, 99%, or 100%) sequence identity to SEQ ID NO: 29.

[0170] 91. The method of any of embodiments 73-86, wherein the anti-TCRβV antibody molecule comprises a VL having at least 85% (e.g., at least 85%, 90%, 95%, 96%, 97%, 98%, 99%, or 100%) sequence identity to SEQ ID NO: 30.

[0171] 92. The method of any of the preceding embodiments, wherein the infectious disease is HIV and the anti-TCRβV antibody molecule binds to the TCRβ V5 subfamily, e.g., comprising TCRβ V5-6*01.

[0172] 93. The method of embodiment 92, wherein the antigen is Gag p17 (77-85).

[0173] 94. The method of embodiment 92 or 93, wherein the MHC restriction is HLA-B*0801

[0174] 95. The method of any of embodiments 92-94, wherein the subject has a higher, e.g., increased, level or activity of a TCRβ V5 subfamily, e.g., comprising TCRβ V5-6*01.

[0175] 96. The method of any of the preceding embodiments, wherein the infectious disease is EBV and the anti-TCRβV antibody molecule binds to the TCRβ V7 subfamily, e.g., comprising TCRβ V7-7*01, TCRβ V7-6*01, TCRβ V7-8*02, TCRβ V7-4*01, TCRβ V7-2*02, TCRβ V7-2*03, TCRβ V7-2*01, TCRβ V7-3*01, TCRβ V7-9*03, or TCRβ V7-9*01.

[0176] 97. The method of embodiment 96, wherein the antigen is EBNA3(339-347).

[0177] 98. The method of embodiment 96 or 97, wherein the MHC restriction is HLA-B*0801.

[0178] 99. The method of any of embodiments 96-98, wherein the subject has a higher, e.g., increased, level or activity of a TCRβ V7 subfamily, e.g., comprising TCRβ V7-7*01, TCRβ V7-6*01, TCRβ V7-8*02, TCRβ V7-4*01, TCRβ V7-2*02, TCRβ V7-2*03, TCRβ V7-2*01, TCRβ V7-3*01, TCRβ V7-9*03, or TCRβ V7-9*01.

[0179] 100. The method of any of the preceding embodiments, wherein the infectious disease is SIV and the anti-TCRβV antibody molecule binds to the TCRβ V14 subfamily, e.g., comprising TCRβ V14*01.

[0180] 101. The method of embodiment 100, wherein the subject has a higher, e.g., increased, level or activity of a TCRβ V14 subfamily, e.g., comprising TCRβ V14*01.

[0181] 102. The method of any of the preceding embodiments, wherein the infectious disease is EBV and the anti-TCRβV antibody molecule binds to the TCRβ V9 subfamily, e.g., comprising TCRβ V9*01 or TCRβ V9*02.

[0182] 103. The method of embodiment 102, wherein the antigen is EBNA1(407-417).

[0183] 104. The method of embodiment 102 or 103, wherein the MHC restriction is HLA-B*3508 or HLA-B*3501.

[0184] 105. The method of any of embodiments 102-104, wherein the subject has a higher, e.g., increased, level or activity of a TCRβ V9 subfamily, e.g., comprising TCRβ V9*01 or

[0185] 106. The method of any of the preceding embodiments, wherein the infectious disease is SIV and the anti-TCRβ V antibody molecule binds to the TCRβ V13 subfamily, e.g., comprising TCRβ V13*01.

[0186] 107. The method of embodiment 106, wherein the subject has a higher, e.g., increased, level or activity of a TCRβ V13 subfamily, e.g., comprising TCRβ V13*01.

[0187] 108. The method of any of the preceding embodiments, wherein the infectious disease is influenza and the anti-TCRβ V antibody molecule binds to the TCRβ V19 subfamily, e.g., comprising TCRβ V19*01, or TCRβ V19*02.

[0188] 109. The method of embodiment 108, wherein the antigen is Matrix protein (58-66).

[0189] 110. The method of embodiment 108 or 109, wherein the MHC restriction is HLA-A2.

[0190] 111. The method of any of embodiments 108-110, wherein the subject has a higher, e.g., increased, level or activity of a TCRβ V19 subfamily, e.g., comprising TCRβ V19*01, or TCRβ V19*02.

[0191] 112. The method of any of the preceding embodiments, wherein the infectious disease is HIV and the anti-TCRβV antibody molecule binds to the TCRβ V19 subfamily, e.g., comprising TCRβ V19*01, or TCRβ V19*02.

[0192] 113. The method of embodiment 112, wherein the subject has a higher, e.g., increased, level or activity of a TCRβ V19 subfamily, e.g., comprising TCRβ V19*01, or TCRβ V19*02.

[0193] 114. The method of any of the preceding embodiments, wherein the infectious disease is HIV and the anti-TCRβV antibody molecule binds to the TCRβ V23 subfamily, e.g., comprising TCRβ V23-1.

[0194] 115. The method of embodiment 114, wherein the subject has a higher, e.g., increased, level or activity of a TCRβ V23 subfamily, e.g., comprising TCRβ V23-1.

[0195] 116. The method of any of the preceding embodiments, wherein the anti-TCRβ V antibody molecule:
[0196] (i) binds specifically to an epitope on TCRβ V, e.g., the same or similar epitope as the epitope recognized by an anti-TCRβ V antibody molecule as described herein, e.g., a second anti-TCRβ V antibody molecule;
[0197] (ii) shows the same or similar binding affinity or specificity, or both, as an anti-TCRβ V antibody molecule as described herein, e.g., a second anti-TCRβ V antibody molecule;
[0198] (iii) inhibits, e.g., competitively inhibits, the binding of an anti-TCRβV antibody molecule as described herein, e.g., a second anti-TCRβV antibody molecule;
[0199] (iv) binds the same or an overlapping epitope with an anti-TCRβV antibody molecule as described herein, e.g., a second anti-TCRβV antibody molecule; or
[0200] (v) competes for binding, and/or binds the same epitope, with an anti-TCRβV antibody molecule as described herein, e.g., a second anti-TCRβV antibody molecule,

[0201] 117. The method of any of the preceding embodiments, wherein the anti-TCRβV antibody molecule comprises an antigen binding domain comprising:
[0202] (i) a heavy chain complementarity determining region 1 (HC CDR1), a heavy chain complementarity determining region 2 (HC CDR2) and/or a heavy chain complementarity determining region 3 (HC CDR3) of SEQ ID NO: 1 or SEQ ID NO: 9; or
[0203] (ii) a light chain complementarity determining region 1 (LC CDR1), a light chain complementarity determining region 2 (LC CDR2), and/or a light chain complementarity determining region 3 (LC CDR3) of SEQ ID NO: 2, SEQ ID NO: 10, or SEQ ID NO: 11.

[0204] 118. The method of any of the preceding embodiments, wherein the anti-TCRβV antibody molecule comprises an antigen binding domain comprising a light chain variable region (VL) comprising one, two or all (e.g., three) of a LC CDR1, a LC CDR2 and a LC CDR3 of SEQ ID NO: 2, SEQ ID NO: 10, or SEQ ID NO: 11.

[0205] 119. The method of any of the preceding embodiments, wherein the anti-TCRβV antibody molecule comprises an antigen binding domain comprising a heavy chain variable region (VH) comprising one, two or all (e.g., three) of a HC CDR1, a HC CDR2 and a HC CDR3 of SEQ ID NO:1 or SEQ ID NO: 9.

[0206] 120. The method of any of the preceding embodiments, wherein the anti-TCRβV antibody molecule comprises an antigen binding domain comprising:
[0207] (i) a VL comprising: a LC CDR1 amino acid sequence of SEQ ID NO: 6 (or an amino acid sequence with not more than 1, 2, 3 or 4 modifications, e.g., substitutions, additions or deletions thereof), a LC CDR2 amino acid sequence of SEQ ID NO:7 (or an amino acid sequence with not more than 1, 2, 3 or 4 modifications, e.g., substitutions, additions or deletions thereof), and/or a LC CDR3 amino acid sequence of SEQ ID NO:8 (or an amino acid sequence with not more than 1, 2, 3 or 4 modifications, e.g., substitutions, additions or deletions thereof); and/or
[0208] (ii) a VH comprising: a HC CDR1 amino acid sequence of SEQ ID NO: 3 (or an amino acid sequence with not more than 1, 2, 3 or 4 modifications, e.g., substitutions, additions or deletions thereof), a HC CDR2 amino acid sequence of SEQ ID NO:4 (or an amino acid sequence with not more than 1, 2, 3 or 4 modifications, e.g., substitutions, additions or deletions thereof), and/or a HC CDR3 amino acid sequence of SEQ ID NO:5 (or an amino acid sequence with not more than 1, 2, 3 or 4 modifications, e.g., substitutions, additions or deletions thereof).

[0209] 121. The method of any of the preceding embodiments, wherein the anti-TCRβV antibody molecule comprises an antigen binding domain comprising: a variable heavy chain (VH) of SEQ ID NO: 9, or a sequence having at least about 85%, 90%, 95%, or 99% sequence identity thereto; and/or a variable light chain (VL) of SEQ ID NO: 10 or SEQ ID NO: 11, or a sequence having at least about 85%, 90%, 95%, or 99% sequence identity thereto.

[0210] 122. The method of any of the preceding embodiments, wherein the anti-TCRβV antibody molecule comprises an antigen binding domain comprising the VH amino acid sequence of SEQ ID NO: 9 and the VL amino acid sequence of SEQ ID NO: 10.

[0211] 123. The method of any of the preceding embodiments, wherein the anti-TCRβV antibody molecule comprises an antigen binding domain comprising the VH amino acid sequence of SEQ ID NO: 9 and the VL amino acid sequence of SEQ ID NO: 11.

[0212] 124. The method of any of the preceding embodiments, wherein the anti-TCRβV antibody molecule comprises an antigen binding domain comprising a single chain Fv (scFv) or a Fab.

[0213] 125. The method of any of the preceding embodiments, wherein the anti-TCRβV antibody molecule binds to a conformational or a linear epitope on the T cell.

[0214] 126. The method of any of the preceding embodiments, wherein the anti-TCRβV antibody molecule is a full antibody (e.g., an antibody that includes at least one, and preferably two, complete heavy chains, and at least one, and preferably two, complete light chains), or an antigen-binding fragment (e.g., a Fab, F(ab′)₂, Fv, a single chain Fv fragment, a single domain antibody, a diabody (dAb), a bivalent antibody, or bispecific antibody or fragment thereof, a single domain variant thereof, or a camelid antibody).

[0215] 127. The method of embodiment 126, wherein the anti-TCRβV antibody molecule comprises a heavy chain constant region chosen from IgG1, IgG2, IgG3, or IgG4, or a fragment thereof.

[0216] 128. The method of embodiment 126 or 127, wherein the anti-TCRβV antibody molecule comprises a light chain constant region chosen from the light chain constant regions of kappa or lambda, or a fragment thereof.

[0217] 129. A method of making, e.g., producing or manufacturing, the anti-TCRβV antibody molecule of the method of any of the preceding embodiments, comprising culturing a host cell comprising a nucleic acid encoding the anti-TCRβV antibody molecule, under suitable conditions, e.g., conditions suitable expression of the anti- TCRβV antibody molecule.

[0218] 130. A pharmaceutical composition comprising the anti-TCRβV antibody molecule of the method of any of the preceding embodiments, and a pharmaceutically acceptable carrier, excipient, or stabilizer.

[0219] 131. The method of any of embodiments 1-128, wherein the expansion occurs in vivo or ex vivo (e.g., in vitro).

[0220] 132. The method of any of embodiments 1-128 or 131, wherein the T cell population comprises a T cell, a Natural Killer cell, a B cell, or a myeloid cell.

[0221] 133. The method of any of embodiments 1-128, 131, or 132, wherein the T cell population comprises a CD4 T cell, a CD8 T cell, e.g., an effector T cell or a memory T cell (e.g., a memory effector T cell (e.g., T_{EM} cell, e.g., T_{EMRA} cell), or a combination thereof.

[0222] 134. The method of any of embodiments 1-128 or 131-133, wherein the T cell population is obtained from a healthy subject.

[0223] 135. The method of any of embodiments 1-128 or 131-134, wherein the T cell population is obtained from a subject (e.g., from an apheresis sample from the subject) having a disease, e.g., an infectious disease, e.g., as described herein.

[0224] 136. The method of any of embodiments 1-128 or 131-135, wherein the method results in an expansion of at least 1.1-10 fold (e.g., at least 1.1, 1.2, 1.3, 1.4, 1.5, 2, 3, 4, 5, 6, 7, 8, 9, or 10 fold expansion).

[0225] 137. The method of any of embodiments 1-128 or 131-136, further comprising contacting the population of cells with an agent that promotes, e.g., increases, immune cell (e.g., T cell) expansion.

[0226] 138. The method of any of embodiments 1-128 or 131-137, further comprising contacting the population of cells with an additional therapeutic agent.

[0227] 139. The method of embodiment 138, wherein the additional therapeutic agent targets the infectious disease.

[0228] 140. The method of any of embodiments 1-128 or 131-139, further comprising contacting the population of cells with a non-dividing population of cells, e.g., feeder cells, e.g., irradiated allogenic human PBMCs.

[0229] 141. The method of any of embodiments 1-128 or 131-140, wherein the population of cells is expanded in an appropriate media (e.g., media described herein) that includes one or more cytokines, e.g., IL-2, IL-7, IL-15, or a combination thereof.

[0230] 142. The method of any of embodiments 1-128 or 131-141, wherein the population of cells is expanded for a period of at least about 4 hours, 6 hours, 10 hours, 12 hours, 15 hours, 18 hours, 20 hours, or 22 hours, or for at least 1, 2, 3, 4, 5, 6, 7, 8, 9, 10, 11, 12, 13, 14, 15, 1,6 17, 18, 19, 20 or 21 days, or for at least about 1 week, 2 weeks, 3 weeks, 4 weeks, 5 weeks, 6 weeks, 7 weeks or 8 weeks.

[0231] 143. The method of any of embodiments 1-128 or 131-142, wherein expansion of the population of T cells is compared to expansion of a similar population of cells with an antibody that binds to: a CD3 molecule, e.g., CD3 epsilon (CD3e) molecule; or a TCR alpha (TCRα) molecule.

[0232] 144. The method of any of embodiments 1-128 or 131-143, wherein expansion of the population of T cells is compared to expansion of a similar population of cells not contacted with the anti-TCRβV antibody molecule.

[0233] 145. The method of any of embodiments 1-128 or 131-144, wherein expansion of the population of T cells, e.g., memory effector T cells, e.g., T_{EM} cells, e.g., T_{EMRA} cells, is compared to expansion of a similar population of cells with an antibody that binds to: a CD3 molecule, e.g., CD3 epsilon (CD3e) molecule; or a TCR alpha (TCRα) molecule.

[0234] 146. The method of any of embodiments 1-128 or 131-145, wherein the population of expanded T cells, e.g., expanded T effector memory cells, comprises cells which: (i) have a detectable level of CD45RA, e.g., express or re-express CD45RA; (ii) have low or no expression of CCR7; and/or (iii) have a detectable level of CD95, e.g., express CD95, e.g., a population of CD45RA+, CCR7−, CD95+ T cells, optionally wherein the T cells comprise CD3+, CD4+or CD8+T cells.

[0235] 147. The method of any of embodiments 1-128 or 131-146, wherein the antibody molecule, e.g., humanized antibody molecule, which binds, e.g., specifically binds, to the TCRβV region (the anti-TCRβV antibody molecule) is chosen from:
[0236] (A) a humanized antibody molecule which binds, e.g., specifically binds, to a T cell receptor beta variable chain (TCRβV) region chosen from TCRβV V5-6, TCRβV V6-5, TCRβV V7, TCRβV V9, TCRβV V10, TCRβV V12 (e.g., TCRβV V12-4), TCRβV V13, TCRβV V14, TCRβV V19, TCR3V V23-1, or a subfamily member thereof (e.g., as listed in Table 1 or Table 2)
[0237] (B) a humanized antibody molecule which:
[0238] (i) binds specifically to an epitope on TCRβV, e.g., the same or similar epitope as the epitope recognized by a second anti-TCRβV antibody molecule;
[0239] (ii) shows the same or similar binding affinity or specificity, or both, as a second anti-TCRβV antibody molecule;
[0240] (iii) inhibits, e.g., competitively inhibits, the binding of a second anti-TCRβV antibody molecule;
[0241] (iv) binds the same or an overlapping epitope with an anti-TCRβV antibody molecule as a second anti-TCRβV antibody molecule; or
[0242] (v) competes for binding, and/or binds the same epitope, with a second anti-TCRβV antibody molecule,
[0243] wherein the second anti-TCRβV antibody molecule comprises an antigen binding domain comprising:
[0244] (1) a heavy chain complementarity determining region (HC CDR1), a HC CDR2 and/or a HC CDR3 of SEQ ID NO: 3, SEQ ID NO: 4, and/or SEQ ID NO: 5, and/or
[0245] (2) a light chain complementarity determining region 1 (LC CDR1), a LC CDR2, and/or a LC CDR3 of SEQ ID NO: 6, SEQ ID NO: 7, and/or SEQ ID NO: 8;
[0246] (1) a heavy chain complementarity determining region (HC CDR1), a HC CDR2 and/or a HC CDR3 of SEQ ID NO: 45, SEQ ID NO: 46, and/or SEQ ID NO: 47, and/or
[0247] (2) a light chain complementarity determining region 1 (LC CDR1), a LC CDR2, and/or a LC CDR3 of SEQ ID NO: 51, SEQ ID NO: 52, and/or SEQ ID NO: 53;
[0248] (1) a heavy chain complementarity determining region (HC CDR1), a HC CDR2 and/or a HC CDR3 of SEQ ID NO: 48, SEQ ID NO: 49, and/or SEQ ID NO: 50, and/or
[0249] (2) a light chain complementarity determining region 1 (LC CDR1), a LC CDR2, and/or a LC CDR3 of SEQ ID NO: 54, SEQ ID NO: 55, and/or SEQ ID NO: 56;
[0250] (1) a heavy chain complementarity determining region (HC CDR1), a HC CDR2 and/or a HC CDR3 of SEQ ID NO: 17, SEQ ID NO: 18, and/or SEQ ID NO: 19, and/or
[0251] (2) a light chain complementarity determining region 1 (LC CDR1), a LC CDR2, and/or a LC CDR3 of SEQ ID NO: 20, SEQ ID NO: 21, and/or SEQ ID NO: 22;
[0252] (1) a heavy chain complementarity determining region (HC CDR1), a HC CDR2 and/or a HC CDR3 of SEQ ID NO: 57, SEQ ID NO: 58, and/or SEQ ID NO: 59, and/or
[0253] (2) a light chain complementarity determining region 1 (LC CDR1), a LC CDR2, and/or a LC CDR3 of SEQ ID NO: 63, SEQ ID NO: 64, and/or SEQ ID NO: 65;
[0254] (1) a heavy chain complementarity determining region (HC CDR1), a HC CDR2 and/or a HC CDR3 of SEQ ID NO: 60, SEQ ID NO: 61, and/or SEQ ID NO: 62, and/or
[0255] (2) a light chain complementarity determining region 1 (LC CDR1), a LC CDR2, and/or a LC CDR3 of SEQ ID NO: 66, SEQ ID NO: 67, and/or SEQ ID NO: 68; or
[0256] (1) a heavy chain complementarity determining region (HC CDR1), a HC CDR2 and/or a HC CDR3 of SEQ ID NO: 15, SEQ ID NO: 23, SEQ ID NO: 24, or SEQ ID NO: 25, and/or
[0257] (2) a light chain complementarity determining region 1 (LC CDR1), a LC CDR2, and/or a LC CDR3 of SEQ ID NO: 16, SEQ ID NO: 26, SEQ ID NO: 27, SEQ ID NO: 28, SEQ ID NO: 29, or SEQ ID NO: 30; or
[0258] (C) a humanized antibody molecule which binds, e.g., specifically binds, to a T cell receptor beta variable chain (TCRβV) region, wherein the anti-TCRβV antibody molecule comprises an antigen binding domain comprising:
[0259] (1) a heavy chain complementarity determining region (HC CDR1), a HC CDR2 and/or a HC CDR3 of SEQ ID NO: 3, SEQ ID NO: 4, and/or SEQ ID NO: 5, and/or
[0260] (2) a light chain complementarity determining region 1 (LC CDR1), a LC CDR2, and/or a LC CDR3 of SEQ ID NO: 6, SEQ ID NO: 7, and/or SEQ ID NO: 8;
[0261] (1) a heavy chain complementarity determining region (HC CDR1), a HC CDR2 and/or a HC CDR3 of SEQ ID NO: 45, SEQ ID NO: 46, and/or SEQ ID NO: 47, and/or
[0262] (2) a light chain complementarity determining region 1 (LC CDR1), a LC CDR2, and/or a LC CDR3 of SEQ ID NO: 51, SEQ ID NO: 52, and/or SEQ ID NO: 53;
[0263] (1) a heavy chain complementarity determining region (HC CDR1), a HC CDR2 and/or a HC CDR3 of SEQ ID NO: 48, SEQ ID NO: 49, and/or SEQ ID NO: 50, and/or
[0264] (2) a light chain complementarity determining region 1 (LC CDR1), a LC CDR2, and/or a LC CDR3 of SEQ ID NO: 54, SEQ ID NO: 55, and/or SEQ ID NO: 56;
[0265] (1) a heavy chain complementarity determining region (HC CDR1), a HC CDR2 and/or a HC CDR3 of SEQ ID NO: 17, SEQ ID NO: 18, and/or SEQ ID NO: 19, and/or (2) a light chain complementarity determining region 1 (LC CDR1), a LC CDR2, and/or a LC CDR3 of SEQ ID NO: 20, SEQ ID NO: 21, and/or SEQ ID NO: 22;
[0266] (1) a heavy chain complementarity determining region (HC CDR1), a HC CDR2 and/or a HC CDR3 of SEQ ID NO: 57, SEQ ID NO: 58, and/or SEQ ID NO: 59, and/or
[0267] (2) a light chain complementarity determining region 1 (LC CDR1), a LC CDR2, and/or a LC CDR3 of SEQ ID NO: 63, SEQ ID NO: 64, and/or SEQ ID NO: 65;
[0268] (1) a heavy chain complementarity determining region (HC CDR1), a HC CDR2 and/or a HC CDR3 of SEQ ID NO: 60, SEQ ID NO: 61, and/or SEQ ID NO: 62, and/or
[0269] (2) a light chain complementarity determining region 1 (LC CDR1), a LC CDR2, and/or a LC CDR3 of SEQ ID NO: 66, SEQ ID NO: 67, and/or SEQ ID NO: 68; or
[0270] (i) a heavy chain complementarity determining region (HC CDR1), a HC CDR2 and/or a HC CDR3 of SEQ ID NO: 15, SEQ ID NO: 23, SEQ ID NO: 24, or SEQ ID NO: 25; and/or
[0271] (ii) a light chain complementarity determining region 1 (LC CDR1), a LC CDR2, and/or a LC CDR3 of SEQ ID NO: 16, SEQ ID NO: 26, SEQ ID NO: 27, SEQ ID NO: 28, SEQ ID NO: 29, or SEQ ID NO: 30.

[0272] 148. The method of any of embodiments 1-128 or 131-147, wherein the anti-TCRβV antibody molecule comprises an antigen binding domain comprising a light chain variable region (VL) comprising one, two or all of a LC CDR1, a LC CDR2 and a LC CDR3 of SEQ ID NO: 16, SEQ ID NO: 26, SEQ ID NO: 27, SEQ ID NO: 28, SEQ ID NO: 29, or SEQ ID NO: 30.

[0273] 149. The method of any of embodiments 1-128 or 131-148, wherein the anti-TCRβV antibody molecule comprises an antigen binding domain comprising a heavy chain variable region (VH) comprising one, two or all of a HC CDR1, a HC CDR2 and a HC CDR3 of SEQ ID NO: 15, SEQ ID NO: 23, SEQ ID NO: 24, or SEQ ID NO: 25.

[0274] 150. The method of any of embodiments 1-128 or 131-149, wherein the anti-TCRβV antibody molecule comprises an antigen binding domain comprising:
[0275] (i) a VL comprising: a LC CDR1 amino acid sequence of SEQ ID NO: 20 (or an amino acid sequence with not more than 1, 2, 3 or 4 modifications, e.g., substitutions, additions or deletions thereof), a LC CDR2 amino acid sequence of SEQ ID NO:21 (or an amino acid sequence with not more than 1, 2, 3 or 4 modifications, e.g., substitutions, additions or deletions thereof), and/or a LC CDR3 amino acid sequence of SEQ ID NO:22 (or an amino acid sequence with not more than 1, 2, 3 or 4 modifications, e.g., substitutions, additions or deletions thereof); and/or
[0276] (ii) a VH comprising: a HC CDR1 amino acid sequence of SEQ ID NO: 17 (or an amino acid sequence with not more than 1, 2, 3 or 4 modifications, e.g., substitutions, additions or deletions thereof), a HC CDR2 amino acid sequence of SEQ ID NO:18 (or an amino acid sequence with not more than 1, 2, 3 or 4 modifications, e.g., substitutions, additions or deletions thereof), and/or a HC CDR3 amino acid sequence of SEQ ID NO:19 (or an amino acid sequence with not more than 1, 2, 3 or 4 modifications, e.g., substitutions, additions or deletions thereof).

[0277] 151. The method of any of embodiments 1-128 or 131-150, wherein the anti-TCRβV antibody molecule comprises an antigen binding domain comprising:
[0278] a variable heavy chain (VH) of SEQ ID NO: 23, SEQ ID NO: 24, or SEQ ID NO: 25, or a sequence having at least about 85%, 90%, 95%, or 99% sequence identity thereto; and/or a variable light chain (VL) of SEQ ID NO: 26, SEQ ID NO: 27, SEQ ID NO: 28, SEQ ID NO: 29, or SEQ ID NO: 30, or a sequence having at least about 85%, 90%, 95%, or 99% sequence identity thereto.

[0279] 152. The method of any of embodiments 1-128 or 131-151, wherein the anti-TCRβV antibody molecule comprises a light chain comprising a framework region, e.g., framework region 1 (FR1), comprising one, two or all (e.g., three) of:
[0280] (i) an Aspartic Acid at position 1, e.g., a substitution at position 1 according to Kabat numbering, e.g., a Alanine to Aspartic Acid substitution; or
[0281] (ii) an Asparagine at position 2, e.g., a substitution at position 2 according to Kabat numbering, e.g., a Isoleucine to Asparagine, a Serine to Asparagine, or a Tyrosine to Asparagine substitution; or
[0282] (iii) a Leucine at position 4, e.g., a substitution at position 4 according to Kabat numbering, e.g., a Methionine to Leucine substitution,
[0283] wherein the substitution is relative to a human germline light chain framework region sequence.

[0284] 153. The method of any of embodiments 1-128 or 131-153, wherein the anti-TCRβV antibody molecule comprises a light chain comprising a framework region, e.g., framework region 3 (FR3), comprising one, two or all (e.g., three) of:
[0285] (i) a Glycine at position 66, e.g., a substitution at position 66 according to Kabat numbering, e.g., a Lysine to Glycine, or a Serine to Glycine substitution; or
[0286] (ii) an Asparagine at position 69, e.g., a substitution at position 69 according to Kabat numbering, e.g., a Threonine to Asparagine substitution; or
[0287] (iii) a Tyrosine at position 71, e.g., a substitution at position 71 according to Kabat numbering, e.g., a Phenylalanine to Tyrosine, or Alanine to Tyrosine substitution,
[0288] wherein the substitution is relative to a human germline light chain framework region sequence.

[0289] 154. The method of any of embodiments 1-128 or 131-153, wherein the method results in expansion of, e.g., selective or preferential expansion of, T cells expressing a T cell receptor (TCR) comprising a TCR alpha and/or TCR beta molecule, e.g., TCR alpha-beta T cells (αβ T cells).

[0290] 155. The method of any of embodiments 1-128 or 131-154, wherein the method results in expansion of af3T cells over expansion of T cells expressing a TCR comprising a TCR gamma and/or TCR delta molecule, e.g., TCR gamma-delta T cells (γδ T cells).

[0291] In some embodiments, the anti-TCRβV antibody molecules disclosed herein result in lesser or no production of cytokines associated with cytokine release syndrome (CRS), e.g., IL-6, IL-1beta and TNF alpha; and enhanced and/or delayed production of IL-2 and IFNγ. In some embodiments, the anti-TCRβV antibodies disclosed herein result in expansion of an immune cell, e.g., a T cell, or a subset of memory effector T cells known as T_{EMRA}), an NK cell, or other immune cells (e.g., as described herein). Also provided herein are methods of making said anti-TCRβV antibody molecules, and methods of using said anti-TCRβV antibody molecules including, methods of using an anti-TCRβV antibody molecule for expanding an immune cell or an immune cell population. This disclosure further provides multispecific molecules, e.g., bispecific molecules, comprising said anti-TCRβV antibody molecules. In some embodiments, compositions comprising anti-TCRβV antibody molecules of the present disclosure, can be used, e.g., to activate and/or redirect T cells to treat an infectious disease. In some embodiments, compositions comprising anti-TCRβV antibody molecules as disclosed herein limit the unwanted side-effects of CRS, e.g., CRS associated with anti-CD3e targeting.

[0292] Accordingly, provided herein are, anti-TCRβV antibody molecules, multispecific or multifunctional molecules (e.g., multispecific or multifunctional antibody molecules) (also referred to herein as a “composition”) that comprise anti-TCRβV antibody molecules, nucleic acids encoding the same, methods of producing the aforesaid molecules, pharmaceutical compositions comprising aforesaid molecules, and methods of treating a disease or disorder, e.g., an infectious disease, e.g., as described herein, using the aforesaid molecules. The antibody molecules and pharmaceutical compositions disclosed herein can be used (alone or in combination with other agents or therapeutic modalities) to treat, prevent and/or diagnose disorders and conditions, e.g., an infectious disease, e.g., as described herein.

[0293] In one aspect, the disclosure provides a non-murine, e.g., human or humanized antibody molecule, which binds, e.g., specifically binds, to a T cell receptor beta variable (TCRβV) region. In some embodiments, binding of the anti-TCRβV antibody molecule to a TCRβV region results in one, two, three, four, five, six, seven, eight, nine, ten or more (e.g., all) of the following:
[0294] (i) reduced level, e.g., expression level, and/or activity of IL-10;
[0295] (ii) reduced level, e.g., expression level, and/or activity of IL-6;
[0296] (iii) reduced level, e.g., expression level, and/or activity of TNFα; (iv) increased level, e.g., expression level, and/or activity of IL-2;
[0297] (v) a delay, e.g., at least 1, 2, 3, 4, 5, 6, 7, 8, 9, 10 or more hours delay, in increased level, e.g., expression level, and/or activity of IL-2;
[0298] (vi) a delay, e.g., at least 1, 2, 3, 4, 5, 6, 7, 8, 9, 10 hours delay, in increased level, e.g., expression level, and/or activity of IFNγ;
[0299] (vii) reduced T cell proliferation kinetics;
[0300] (viii) reduced cytokine storm, e.g., cytokine release syndrome (CRS), e.g., as measured by an assay of Example 3;
[0301] (ix) cell killing, e.g., target cell killing;
[0302] (x) increased level, e.g., expression level, and/or activity of IL-15; or
[0303] (xi) increased Natural Killer (NK) cell proliferation, e.g., expansion.

[0304] In some embodiments, any one or all of (i)-(xi) or any combination thereof resulting from an anti-TCRβV antibody molecule disclosed herein is compared to an antibody that binds to: a CD3 molecule, e.g., CD3 epsilon (CD3e) molecule; or a TCR alpha (TCRα) molecule.

[0305] In some embodiments, binding of the anti-TCRβV antibody molecule to a TCRβV region results in secretion, e.g., production of perforin and/or Granzyme B.

[0306] In another aspect, the disclosure provides a non-murine, e.g., human or humanized antibody molecule, which binds, e.g., specifically binds, to a T cell receptor beta variable (TCRβV) region. In some embodiments, binding of the anti-TCRβ V antibody molecule results in expansion, e.g., at least about 1.1-50 fold expansion (e.g., at least about 1.5-40 fold, 2-35 fold, 3-30 fold, 5-25 fold, 8-20 fold, or 10-15 fold expansion), of a population of memory T cells, e.g., T effector memory (T_{EM}) cells, e.g., T_{EM} cells expressing CD45RA (T_{EMRA}) cells, e.g., CD4+or CD8+T_{EMRA} cells. In some embodiments, the expansion is at least about 1.1-10 fold expansion (e.g., at least about 1.1, 1.2, 1.3, 1.4, 1.5, 2, 3, 4, 5, 6, 7, 8, 9, or 10 fold expansion).

[0307] In some embodiments, expansion of the population of memory effector T cells, e.g., T_{EM} cells, e.g., T_{EMRA} cells, e.g., CD4+or CD8+T_{EMRA} cells, is compared to expansion of a similar population of cells with an antibody that binds to: a CD3 molecule, e.g., CD3 epsilon (CD3e) molecule; or a TCR alpha (TCRα) molecule.

[0308] In some embodiments, the population of expanded T effector memory cells comprises cells T cells, e.g., CD3+, CD8+or CD4+T cells. In some embodiments, the population of expanded T effector memory cells comprises CD3+and CD8+T cells. In some embodiments, the population of expanded T effector memory cells comprises CD3+and CD4+T cells.

[0309] In some embodiments, the population of expanded T effector memory (T_{EM}) cells comprises cells T cells, e.g., CD3+, CD8+or CD4+T cells, which express or re-express, CD45RA, e.g., CD45RA+. In some embodiments, the population comprises T_{EM} cells expressing CD45RA, e.g., T_{EMRA} cells. In some embodiments, expression of CD45RA on T_{EMRA} cells, e.g., CD4+or CD8+T_{EMRA} cells, can be detected by a method disclosed herein, e.g., flow cytometry.

[0310] In some embodiments, T_{EMRA} cells have low or no expression of CCR7, e.g., CCR7- or CCR7 low. In some embodiments, expression of CCR7 on T_{EMRA} cells cannot be detected by a method disclosed herein, e.g., flow cytometry.

[0311] In some embodiments, T_{EMRA} cells express CD95, e.g., CD95+. In some embodiments, expression of CD95 on T_{EMRA} cells can be detected by a method disclosed herein, e.g., flow cytometry.

[0312] In some embodiments, T_{EMRA} cells express CD45RA, e.g., CD45RA+, have low or no expression of CCR7, e.g., CCR7- or CCR7 low, and express CD95, e.g., CD95+. In some embodiments T_{EMRA} cells can be identified as CD45RA+, CCR7- and CD95+cells. In some embodiments, T_{EMRA} cells comprise CD3+, CD4+or CD8+T cells (e.g., CD3+T cells, CD3+CD8+T cells, or CD3+CD4+T cells).

[0313] In some embodiments, binding of the anti-TCRβ V antibody molecule to a TCRβ V region results in one, two, three, four, five, six, seven, eight, nine, ten or more (e.g., all) of the following:
[0314] (i) reduced level, e.g., expression level, and/or activity of IL-10;
[0315] (ii) reduced level, e.g., expression level, and/or activity of IL-6;
[0316] (iii) reduced level, e.g., expression level, and/or activity of TNFα;
[0317] (iv) increased level, e.g., expression level, and/or activity of IL-2;
[0318] (v) a delay, e.g., at least 1, 2, 3, 4, 5, 6, 7, 8, 9, 10 or more hours delay, in increased level, e.g., expression level, and/or activity of IL-2;
[0319] (vi) a delay, e.g., at least 1, 2, 3, 4, 5, 6, 7, 8, 9, 10 hours delay, in increased level, e.g., expression level, and/or activity of IFNγ;
[0320] (vii) reduced T cell proliferation kinetics;
[0321] (viii) reduced cytokine storm, e.g., cytokine release syndrome (CRS), e.g., as measured by an assay of Example 3;
[0322] (ix) cell killing, e.g., target cell killing;
[0323] (x) increased level, e.g., expression level, and/or activity of IL-15; or
[0324] (xi) increased Natural Killer (NK) cell proliferation, e.g., expansion, compared to an antibody that binds to: a CD3 molecule, e.g., CD3 epsilon (CD3e) molecule; or a TCR alpha (TCRα) molecule.

[0325] In some embodiments of any of the compositions disclosed herein, binding of the anti-TCRβV antibody molecule to a TCRβV region results in a reduction of at least 2, 5, 10, 20, 50, 100, or 200 fold, or at least 2-200 fold (e.g., 5-150, 10-100, 20-50 fold) in the expression level and or activity of IL-10 as measured by an assay of Example 3.

[0326] In some embodiments of any of the compositions disclosed herein, binding of the anti-TCRβV antibody molecule to a TCRβV region results in a reduction of at least 2, 5, 10, 20, 50, 100, 200, 300, 400, 500, 600, 700, 800, 900, or 1000 fold, or at least 2-1000 fold (e.g., 5-900, 10-800, 20-700, 50-600, 100-500, or 200-400 fold) in the expression level and or activity of IL-6 as measured by an assay of Example 3.

[0327] In some embodiments of any of the compositions disclosed herein, binding of the anti-TCRβV antibody molecule to a TCRβV region results in a reduction of at least 2, 5, 10, 20, 50, 100, 200, 300, 400, 500, 600, 700, 800, 900, 1000, or 2000 fold, or at least 2-2000 fold (e.g., 5-1000, 10-900, 20-800, 50-700, 100-600, 200-500, or 300-400 fold) in the expression level and or activity of TNFα as measured by an assay of Example 3.

[0328] In some embodiments of any of the compositions disclosed herein, binding of the anti-TCRβV antibody molecule to a TCRβV region results in an increase of at least 2, 5, 10, 20, 50, 100, 200, 300, 400, 500, 600, 700, 800, 900, 1000, or 2000 fold, or at least 2-2000 fold (e.g., 5-1000, 10-900, 20-800, 50-700, 100-600, 200-500, or 300-400 fold) in the expression level and or activity of IL-2 as measured by an assay of Example 3.

[0329] In some embodiments of any of the compositions disclosed herein, binding of the anti-TCRβV antibody molecule to a TCRβV region results in an increase of at least 2, 5, 10, 20, 50, 100, 200, 300, 400, 500, 600, 700, 800, 900, 1000, or 2000 fold, or at least 2-2000 fold (e.g., 5-1000, 10-900, 20-800, 50-700, 100-600, 200-500, or 300-400 fold) in the expression level and or activity of IL-15.

[0330] In some embodiments of any of the compositions disclosed herein, binding of the anti-TCRβV antibody molecule results in proliferation, e.g., expansion, e.g., at least about 1.1-50 fold expansion (e.g., at least about 1.5-40 fold, 2-35 fold, 3-30 fold, 5-25 fold, 8-20 fold, or 10-15 fold expansion), of a population of Natural Killer (NK) cells. In some embodiments, the expansion of NK cells is at least about 1.1-30 fold expansion (e.g., at least about 1.1, 1.2, 1.3, 1.4, 1.5, 2, 3, 4, 5, 6, 7, 8, 9, 10, 15, 20, 25, or at least about 1.1-5, 5-10, 10-15, 15-20, 20-25, or 25-30 fold expansion). In some embodiments, the expansion of NK cells by, e.g., binding of, the anti-TCRβV antibody molecule is compared to expansion of an otherwise similar population not contacted with the anti-TCRβV antibody molecule.

[0331] In some embodiments of any of the compositions disclosed herein, binding of the anti-TCRβV antibody molecule results in cell killing, e.g., target cell killing. In some embodiments, binding of the anti-TCRβV antibody molecule results in cell killing in vitro or in vivo.

[0332] In some embodiments of any of the compositions disclosed herein, binding of the anti-TCRβV antibody molecule to a TCRβV region results in an increase or decrease of at least 2, 5, 10, 20, 50, 100, 200, 300, 400, 500, 600, 700, 800, 900, 1000, or 2000 fold, or at least 2-2000 fold (e.g., 5-1000, 10-900, 20-800, 50-700, 100-600, 200-500, or 300-400 fold) of any of the activities described herein compared the activity of Antibody B or murine Antibody C, or a humanized version thereof (e.g., humanized mAb Antibody B-H.1 to B-H.6) as described in U.S. Pat. No. 5,861,155.

[0333] In an aspect, provided herein is an antibody molecule which binds, e.g., specifically binds, to a T cell receptor beta variable chain (TCRβV) region (an anti-TCRβV antibody molecule), wherein the anti-TCRβV antibody molecule:
[0334] (i) binds specifically to an epitope on TCRβV, e.g., the same or similar epitope as the epitope recognized by an anti-TCRβV antibody molecule as described herein, e.g., a second anti-TCRβV antibody molecule;
[0335] (ii) shows the same or similar binding affinity or specificity, or both, as an anti-TCRβV antibody molecule as described herein, e.g., a second anti-TCRβV antibody molecule;
[0336] (iii) inhibits, e.g., competitively inhibits, the binding of an anti-TCRβV antibody molecule as described herein, e.g., a second anti-TCRβV antibody molecule;
[0337] (iv) binds the same or an overlapping epitope with an anti-TCRβV antibody molecule as described herein, e.g., a second anti-TCRβV antibody molecule; or
[0338] (v) competes for binding, and/or binds the same epitope, with an anti-TCRβV antibody molecule as described herein, e.g., a second anti-TCRβV antibody molecule,

[0339] In some embodiments, the second anti-TCRβV antibody molecule comprises an antigen binding domain chosen from Table 3 or Table 4, or a sequence substantially identical thereto. In some embodiments, the second anti-TCRβV antibody molecule comprises an antigen binding domain, comprising:
[0340] a heavy chain complementarity determining region 1 (HC CDR1), a heavy chain complementarity determining region 2 (HC CDR2) and/or a heavy chain complementarity determining region 3 (HC CDR3) of SEQ ID NO: 1 or SEQ ID NO: 9; and/or a light chain complementarity determining region 1 (LC CDR1), a light chain complementarity determining region 2 (LC CDR2), and/or a light chain complementarity determining region 3 (LC CDR3) of SEQ ID NO: 2, SEQ ID NO: 10 or SEQ ID NO: 11.

[0341] In some embodiments of any of the compositions disclosed herein, binding of the anti-TCRβV antibody molecule to a TCRβV region results in a change in any (e.g., one, two, three, four or all) of (i)-(v) that is different, e.g., an increase or decrease, of at least 2, 5, 10, 20, 50, 100-fold, compared the activity of Antibody B or murine Antibody C or a humanized version thereof (e.g., humanized mAb Antibody B-H.1 to B-H.6) as described in U.S. Pat. No. 5,861,155.

[0342] In some embodiments of any of the compositions disclosed herein, the anti-TCRβV antibody molecule binds to a TCRBV family (e.g., gene family), e.g., a TCRBV gene family comprising subfamilies, e.g., as described herein. In some embodiments, the TCRBV family, e.g., gene family, comprises: a TCRβ V6 subfamily, a TCRβ V10 subfamily, a TCRβ V12 subfamily, a TCRβ V5 subfamily, a TCRβ V7 subfamily, a TCRβ V11 subfamily, a TCRβ V14 subfamily, a TCRβ V16 subfamily, a TCRβ V18 subfamily, a TCRβ V9 subfamily, a TCRβ V13 subfamily, a TCRβ V4 subfamily, a TCRβ V3 subfamily, a TCRβ V2 subfamily, a TCRβ V15 v, a TCRβ V30 subfamily, a TCRβ V19 subfamily, a TCRβ V27 subfamily, a TCRβ V28 subfamily, a TCRβ V24 subfamily, a TCRβ V20 subfamily, TCRβ V25 subfamily or a TCRβ V29 subfamily.

[0343] In some embodiments, the anti-TCRβV antibody binds to a TCRβ V6 subfamily chosen from: TCRβ V6-4*01, TCRβ V6-4*02, TCRβ V6-9*01, TCRβ V6-8*01, TCRβ V6-5*01, TCRβ V6-6*02, TCRβ V6-6*01, TCRβ V6-2*01, TCRβ V6-3*01 or TCRβ V6-1*01. In some embodiments the TCRβ V6 subfamily comprises TCRβ V6-5*01.

[0344] In some embodiments, the anti-TCRβV antibody binds to a TCRβ V10 subfamily chosen from: TCRβ V10-1*01, TCRβ V10-1*02, TCRβ V10-3*01 or TCRβ V10-2*01.

[0345] In some embodiments, the anti-TCRβV antibody binds to a TCRβ V12 subfamily chosen from: TCRβ V12-4*01, TCRβ V12-3*01 or TCRβ V12-5*01.

[0346] In some embodiments of any of the compositions disclosed herein, the anti-TCRβV antibody molecule does not bind to TCRβ V12, or binds to TCRβ V12 with an affinity and/or binding specificity that is less than (e.g., less than about 10%, 20%, 30%, 40%, 50%, 60%, 70%, 80%, 90% or about 2-, 5-, or 10-fold) the affinity and/or binding specificity of the murine mAb Antibody B or a humanized version thereof (e.g., humanized mAb Antibody B-H.1 to B-H.6) as described in U.S. Pat. No. 5,861,155.

[0347] In some embodiments of any of the compositions disclosed herein, the anti-TCRβV antibody molecule binds to TCRβ V12 with an affinity and/or binding specificity that is greater than (e.g., greater than about 10%, 20%, 30%, 40%, 50%, 60%, 70%, 80%, 90% or about 2-, 5-, or 10-fold) the affinity and/or binding specificity of the murine mAb Antibody B or a humanized version thereof (e.g., humanized mAb Antibody B-H.1 to B-H.6) as described in U.S. Pat. No. 5,861,155.

[0348] In some embodiments of any of the compositions disclosed herein, the anti-TCRβV antibody molecule binds to a TCRβV region other than TCRβ V12 (e.g., TCRβV region as described herein, e.g., TCRβ V6 subfamily (e.g., TCRβ V6-5*01) with an affinity and/or binding specificity that is greater than (e.g., greater than about 10%, 20%, 30%, 40%, 50%, 60%, 70%, 80%, 90% or about 2-, 5-, or 10-fold) the affinity and/or binding specificity of the murine mAb Antibody B or a humanized version thereof (e.g., humanized mAb Antibody B-H.1 to B-H.6) as described in U.S. Pat. No. 5,861,155.

[0349] In some embodiments of any of the compositions disclosed herein, the anti-TCRβV antibody molecule does not comprise the CDRs of the murine mAb Antibody B.

[0350] In some embodiments of any of the compositions disclosed herein, the anti-TCRβV antibody binds to a TCRβ V5 subfamily chosen from: TCRβ V5-5*01, TCRβ V5-6*01, TCRβ V5-4*01, TCRβ V5-8*01, TCRβ V5-1*01.

[0351] In some embodiments of any of the compositions disclosed herein, the anti-TCRβV antibody binds to a TCRβ V5 subfamily chosen from: TCRβ V5-5*01, TCRβ V5-6*01, TCRβ V5-4*01, TCRβ V5-8*01, TCRβ V5-1*01.

[0352] In some embodiments of any of the compositions disclosed herein, the anti-TCRβV antibody molecule does not bind to TCRβ V5-5*01 or TCRβ V5-1*01, or binds to TCRβ V5-5*01 or TCRβ V5-1*01 with an affinity and/or binding specificity that is less than (e.g., less than about 10%, 20%, 30%, 40%, 50%, 60%, 70%, 80%, 90% or about 2-, 5-, or 10-fold) the affinity and/or binding specificity of murine Antibody C or a humanized version thereof as described in U.S. Pat. No. 5,861,155.

[0353] In some embodiments of any of the compositions disclosed herein, the anti-TCRβV antibody molecule binds to TCRβ V5-5*01 or TCRβ V5-1*0lwith an affinity and/or binding specificity that is greater than (e.g., greater than about 10%, 20%, 30%, 40%, 50%, 60%, 70%, 80%, 90% or about 2-, 5-, or 10-fold) the affinity and/or binding specificity of murine Antibody C or a humanized version thereof as described in U.S. Pat. No. 5,861,155.

[0354] In some embodiments of any of the compositions disclosed herein, the anti-TCRβV antibody molecule binds to a TCRβV region other than TCRβ V5-5*01 or TCRβ V5-1*01 (e.g., TCRβV region as described herein, e.g., TCRβ V6 subfamily (e.g., TCRβ V6-5*01) with an affinity and/or binding specificity that is greater than (e.g., greater than about 10%, 20%, 30%, 40%, 50%, 60%, 70%, 80%, 90% or about 2-, 5-, or 10-fold) the affinity and/or binding specificity of murine Antibody C or a humanized version thereof as described in U.S. Pat. No. 5,861,155.

[0355] In some embodiments of any of the compositions disclosed herein, the anti-TCRβV antibody molecule does not comprise the CDRs of murine Antibody C.

[0356] In some embodiments of any of the compositions disclosed herein, the anti-TCRβV antibody molecule binds to one or more (e.g., all) of the following TCRβV subfamilies:
[0357] (i) TCRβ V6, e.g., TCRβ V6-4*01, TCRβ V6-4*02, TCRβ V6-9*01, TCRβ V6-8*01, TCRβ V6-5*01, TCRβ V6-6*02, TCRβ V6-6*01, TCRβ V6-2*01, TCRβ V6-3*01 or TCRβ V6-1*01;
[0358] (ii) TCRβ V10, e.g., TCRβ V10-1*01, TCRβ V10-1*02, TCRβ V10-3*01 or TCRβ V10-2*01;
[0359] (iii) TCRβ V12, e.g., TCRβ V12-4*01, TCRβ V12-3*01, or TCRβ V12-5*01; or
[0360] (iv) TCRβ V5, e.g., TCRβ V5-5*01, TCRβ V5-6*01, TCRβ V5-4*01, TCRβ V5-8*01, TCRβV5-1*01.

[0361] In some embodiments, the anti-TCRβV antibody molecule binds to TCRβ V6, e.g., TCRβ V6-4*01, TCRβ V6-4*02, TCRβ V6-9*01, TCRβ V6-8*01, TCRβ V6-5*01, TCRβ V6-6*02, TCRβ V6-6*01, TCRβ V6-2*01, TCRβ V6-3*01 or TCRβ V6-1*01. In some embodiments, the anti-TCRβV antibody molecule binds to TCRβ V6-5*01.

[0362] In some embodiments, the anti-TCRβV antibody molecule does not bind to TCRβ V12.

[0363] In some embodiments, the anti-TCRβV antibody molecule does not bind to TCRβ V5-5*01 or TCRβ V5-1*01.

[0364] In another aspect, provided herein is a method of expanding, e.g., increasing the number of, an immune cell population comprising, contacting the immune cell population with an antibody molecule, e.g., humanized antibody molecule, which binds, e.g., specifically binds, to a T cell receptor beta variable chain (TCRβV) region (e.g., anti-TCRβV antibody molecule described herein or a multispecific molecule comprising an anti-TCRβV antibody molecule described herein), thereby expanding the immune cell population.

[0365] In some embodiments, the expansion occurs in vivo or ex vivo (e.g., in vitro).

[0366] In some embodiments, the immune cell population comprises a T cell, a Natural Killer cell, a B cell, an antigen presenting cell, or a myeloid cell (e.g., a monocyte, a macrophage, a neutrophil or a granulocyte).

[0367] In some embodiments, the immune cell population comprises a T cell, e.g., a CD4+T cell, a CD8+T cell, a TCR alpha-beta T cell, or a TCR gamma-delta T cell. In some embodiments, a T cell comprises a memory T cell (e.g., a central memory T cell, or an effector memory T cell (e.g., a T_{EMRA}) or an effector T cell.

[0368] In some embodiments, the immune cell population is obtained from a healthy subject.

[0369] In some embodiments, the immune cell population is obtained from a subject (e.g., from an apheresis sample from the subject) having a disease, e.g., infectious disease, e.g., as described herein. In some embodiments, the immune cell population obtained from a subject having a disease, e.g., an infectious disease, comprises a T cell, a Natural Killer cell, a B cell, or a myeloid cell.

[0370] In some embodiments, the method results in an expansion of at least 1.1-10 fold (e.g., at least 1.1, 1.2, 1.3, 1.4, 1.5, 2, 3, 4, 5, 6, 7, 8, 9, or 10 fold expansion).

[0371] In some embodiments, the method further comprises contacting the population of cells with an agent that promotes, e.g., increases, immune cell expansion. In some embodiments, the agent includes an immune checkpoint inhibitor, e.g., as described herein. In some embodiments, the agent includes a 4-1BB (CD127) agonist, e.g., an anti-4-1BB antibody.

[0372] In some embodiments, the method further comprises comprising contacting the population of cells with a non-dividing population of cells, e.g., feeder cells, e.g., irradiated allogenic human PBMCs.

[0373] In some embodiments, an expansion method described herein comprises expanding the cells for a period of at least about 4 hours, 6 hours, 10 hours, 12 hours, 15 hours, 18 hours, 20 hours, or 22 hours, or for at least 1, 2, 3, 4, 5, 6, 7, 8, 9, 10, 11, 12, 13, 14, 15, 1,6 17, 18, 19, 20 or 21 days, or for at least about 1 week, 2 weeks, 3 weeks, 4 weeks, 5 weeks, 6 weeks, 7 weeks or 8 weeks.

[0374] In some embodiments, expansion of the population of immune cells, is compared to expansion of a similar population of cells with an antibody that binds to: a CD3 molecule, e.g., CD3 epsilon (CD3e) molecule; or a TCR alpha (TCRα) molecule.

[0375] In some embodiments, expansion of the population of immune cells, is compared to expansion of a similar population of cells not contacted with the anti-TCRβV antibody molecule.

[0376] In some embodiments, expansion of the population of memory effector T cells, e.g., TEM cells, e.g., T_{EMRA} cells, is compared to expansion of a similar population of cells with an antibody that binds to: a CD3 molecule, e.g., CD3 epsilon (CD3e) molecule; or a TCR alpha (TCRα) molecule.

[0377] In some embodiments, the method results in expansion of, e.g., selective or preferential expansion of, T cells expressing a T cell receptor (TCR) comprising a TCR alpha and/or TCR beta molecule, e.g., TCR alpha-beta T cells (αβ T cells).

[0378] In some embodiments, the method results in expansion of af3T cells over expansion of T cells expressing a TCR comprising a TCR gamma and/or TCR delta molecule, e.g., TCR gamma-delta T cells (γδ T cells). In some embodiments, expansion of GOT cells over y6 T cells results in reduced production of cytokines associated with CRS. In some embodiments, expansion of GOT cells over y6 T cells results in immune cells that have reduced capacity to, e.g., are less prone to, induce CRS upon administration into a subject.

[0379] In some embodiments, an immune cell population (e.g., T cells (e.g., T_{EMRA} cells or TILs) or NK cells) cultured in the presence of, e.g., expanded with, an anti- TCRβV antibody disclosed herein does not induce CRS when administered into a subject, e.g., a subject having a disease or condition as described herein.

[0380] Alternatively or in combination with any of the embodiments disclosed herein, provided herein is an anti-TCRβV antibody molecule which:
[0381] (i) binds specifically to an epitope on TCRβV, e.g., the same or similar epitope as the epitope recognized by an anti-TCRβV antibody molecule as described herein, e.g., a second anti-TCRβV antibody molecule;
[0382] (ii) shows the same or similar binding affinity or specificity, or both, as an anti-TCRβV antibody molecule as described herein, e.g., a second anti-TCRβV antibody molecule;
[0383] (iii) inhibits, e.g., competitively inhibits, the binding of an anti-TCRβV antibody molecule as described herein, e.g., a second anti-TCRβV antibody molecule;
[0384] (iv) binds the same or an overlapping epitope with an anti-TCRβV antibody molecule as described herein, e.g., a second anti-TCRβV antibody molecule; or
[0385] (v) competes for binding, and/or binds the same epitope, with an anti-TCRβV antibody molecule as described herein, e.g., a second anti-TCRβV antibody molecule,

[0386] In some embodiments, the second anti-TCRβV antibody molecule comprises an antigen binding domain chosen from Table 3 or Table 4, or a sequence substantially identical thereto. In some embodiments, the second anti-TCRβV antibody molecule comprises an antigen binding domain, comprising:
[0387] a heavy chain complementarity determining region 1 (HC CDR1), a heavy chain complementarity determining region 2 (HC CDR2) and/or a heavy chain complementarity determining region 3 (HC CDR3) of SEQ ID NO: 1 or SEQ ID NO: 9; and/or a light chain complementarity determining region 1 (LC CDR1), a light chain complementarity determining region 2 (LC CDR2), and/or a light chain complementarity determining region 3 (LC CDR3) of SEQ ID NO: 2, SEQ ID NO: 10, or SEQ ID NO: 11.

[0388] In another aspect, the disclosure provides a multispecific molecule, e.g., a bispecific molecule, comprising the anti-TCRβV antibody molecule disclosed herein.

[0389] In some embodiments, the multispecific molecule further comprises: an infectious disease-targeting moiety, a cytokine molecule, an immune cell engager, e.g., a second immune cell engager, and/or a stromal modifying moiety.

[0390] In yet another aspect, disclosed herein is a multispecific molecule, e.g., a bispecific molecule, comprising:
[0391] (i) a first moiety comprising a first immune cell engager comprising an anti-TCRβV antibody molecule disclosed herein; and
[0392] (ii) a second moiety comprising one or more of: an infectious disease-targeting moiety; a second immune cell engager; a cytokine molecule or a stromal modifying moiety.

[0393] In some embodiments of any of the compositions disclosed herein, the anti-TCRβV antibody molecule comprises an antigen binding domain comprising:
[0394] (i) a heavy chain complementarity determining region 1 (HC CDR1), a heavy chain complementarity determining region 2 (HC CDR2) and/or a heavy chain complementarity determining region 3 (HC CDR3) of SEQ ID NO: 1 or SEQ ID NO: 9; or
[0395] (ii) a light chain complementarity determining region 1 (LC CDR1), a light chain complementarity determining region 2 (LC CDR2), and/or a light chain complementarity determining region 3 (LC CDR3) of SEQ ID NO: 2, SEQ ID NO: 10, or SEQ ID NO: 11.

[0396] In some embodiments of any of the compositions disclosed herein, the anti-TCRβV antibody molecule comprises an antigen binding domain comprising a light chain variable region (VL) comprising one, two or all (e.g., three) of a LC CDR1, a LC CDR2 and a LC CDR3 of SEQ ID NO: 2, SEQ ID NO: 10, or SEQ ID NO: 11.

[0397] In some embodiments of any of the compositions disclosed herein, the anti-TCRβV antibody molecule comprises an antigen binding domain comprising a heavy chain variable region (VH) comprising one, two or all (e.g., three) of a HC CDR1, a HC CDR2 and a HC CDR3 of SEQ ID NO:1 or SEQ ID NO: 9.

[0398] In some embodiments of any of the compositions disclosed herein, the anti-TCRβV antibody molecule comprises an antigen binding domain comprising:
[0399] (i) a VL comprising: a LC CDR1 amino acid sequence of SEQ ID NO: 6 (or an amino acid sequence with not more than 1, 2, 3 or 4 modifications, e.g., substitutions, additions or deletions thereof), a LC CDR2 amino acid sequence of SEQ ID NO:7 (or an amino acid sequence with not more than 1, 2, 3 or 4 modifications, e.g., substitutions, additions or deletions thereof), and/or a LC CDR3 amino acid sequence of SEQ ID NO:8 (or an amino acid sequence with not more than 1, 2, 3 or 4 modifications, e.g., substitutions, additions or deletions thereof); and/or
[0400] (ii) a VH comprising: a HC CDR1 amino acid sequence of SEQ ID NO: 3 (or an amino acid sequence with not more than 1, 2, 3 or 4 modifications, e.g., substitutions, additions or deletions thereof), a HC CDR2 amino acid sequence of SEQ ID NO: 4 (or an amino acid sequence with not more than 1, 2, 3 or 4 modifications, e.g., substitutions, additions or deletions thereof), and/or a HC CDR3 amino acid sequence of SEQ ID NO: 5 (or an amino acid sequence with not more than 1, 2, 3 or 4 modifications, e.g., substitutions, additions or deletions thereof).

[0401] In some embodiments of any of the compositions disclosed herein, the anti-TCRβV antibody molecule comprises an antigen binding domain comprising:
[0402] a variable heavy chain (VH) of SEQ ID NO: 9, or a sequence having at least about 75%, 80%, 85%, 90%, 95%, or 99% sequence identity thereto; and/or
[0403] a variable light chain (VL) of SEQ ID NO: 10 or SEQ ID NO: 11, or a sequence having at least about 75%, 80%, 85%, 90%, 95%, or 99% sequence identity thereto.

[0404] In some embodiments of any of the compositions disclosed herein, the anti-TCRβV antibody molecule comprises an antigen binding domain comprising the VH amino acid sequence of SEQ ID NO: 9 and the VL amino acid sequence of SEQ ID NO: 10.

[0405] In some embodiments of any of the compositions disclosed herein, the anti-TCRβV antibody molecule comprises an antigen binding domain comprising the VH amino acid sequence of SEQ ID NO: 9 and the VL amino acid sequence of SEQ ID NO: 11.

[0406] In some embodiments of any of the compositions disclosed herein, the anti-TCRβV antibody molecule comprises a heavy chain comprising a framework region, e.g., framework region 3 (FR3), comprising one or both of: (i) a Threonine at position 73, e.g., a substitution at position 73 according to Kabat numbering, e.g., a Glutamic Acid to Threonine substitution; or (ii) a Glycine at position, e.g., a substitution at position 94 according to Kabat numbering, e.g., a Arginine to Glycine substitution. In some embodiments, the substitution is relative to a human germline heavy chain framework region sequence.

[0407] In some embodiments of any of the compositions disclosed herein, the anti-TCRβV antibody molecule comprises a light chain comprising a framework region, e.g., framework region 1 (FR1), comprising a Phenylalanine at position 10, e.g., a substitution at position 10 according to Kabat numbering, e.g., a Serine to Phenyalanine substitution. In some embodiments, the substitution is relative to a human germline light chain framework region sequence.

[0408] In some embodiments of any of the compositions disclosed herein, the anti-TCRβV antibody molecule comprises a light chain comprising a framework region, e.g., framework region 2 (FR2), comprising one or both of: (i) a Histidine at position 36, e.g., a substitution at position 36 according to Kabat numbering, e.g., a Tyrosine to Histidine substitution; or (ii) an Alanine at position 46, e.g., a substitution at position 46 according to Kabat numbering, e.g., a Arginine to Alanine substitution. In some embodiments, the substitution is relative to a human germline light chain framework region sequence.

[0409] In some embodiments of any of the compositions disclosed herein, the anti-TCRβV antibody molecule comprises a light chain comprising a framework region, e.g., framework region 3 (FR3), comprising a Phenylalanine at position 87, e.g., a substitution at position 87 according to Kabat numbering, e.g., a Tyrosine to Phenyalanine substitution. In some embodiments, the substitution is relative to a human germline light chain framework region sequence.

[0410] In some embodiments of any of the compositions disclosed herein, the anti-TCRβV antibody molecule binds to TCRβ V6, e.g., TCRβ V6-4*01, TCRβ V6-4*02, TCRβ V6-9*01, TCRβ V6-8*01, TCRβ V6-5*01, TCRβ V6-6*02, TCRβ V6-6*01, TCRβ V6-2*01, TCRβ V6-3*01 or TCRβ V6-1*01. In some embodiments the anti-TCRβV antibody molecule binds to TCRβ V6-5*01.

[0411] In some embodiments, TCRβ V6, e.g., TCRβ V6-4*01, TCRβ V6-4*02, TCRβ V6-9*01, TCRβ V6-8*01, TCRβ V6-5*01, TCRβ V6-6*02, TCRβ V6-6*01, TCRβ V6-2*01, TCRβ V6-3*01 or TCRβ V6-1*01, is recognized, e.g., bound, by SEQ ID NO: 1 and/or SEQ ID NO: 2. In some embodiments, TCRβ V6, e.g., TCRβ V6-4*01, TCRβ V6-4*02, TCRβ V6-9*01, TCRβ V6-8*01, TCRβ V6-5*01, TCRβ V6-6*02, TCRβ V6-6*01, TCRβ V6-2*01, TCRβ V6-3*01 or TCRβ V6-1*01, is recognized, e.g., bound, by SEQ ID NO: 9 and/or SEQ ID NO: 10. In some embodiments, TCRβ V6, e.g., TCRβ V6-4*01, TCRβ V6-4*02, TCRβ V6-9*01, TCRβ V6-8*01, TCRβ V6-5*01, TCRβ V6-6*02, TCRβ V6-6*01, TCRβ V6-2*01, TCRβ V6-3*01 or TCRβ V6-1*01, is recognized, e.g., bound, by SEQ ID NO: 9 and/or SEQ ID NO: 11. In some embodiments, TCRβ V6-5*01 is recognized, e.g., bound by SEQ ID NO: 9 and/or SEQ ID NO: 10, or a sequence having at least about 75%, 80%, 85%, 90%, 95%, or 99% sequence identity thereto. In some embodiments, TCRβ V6-5*01 is recognized, e.g., bound by SEQ ID NO: 9 and/or SEQ ID NO: 11, or a sequence having at least about 75%, 80%, 85%, 90%, 95%, or 99% sequence identity thereto.

[0412] In some embodiments of any of the compositions disclosed herein, the anti-TCRβV antibody molecule comprises an antigen binding domain comprising:
[0413] (i) a heavy chain complementarity determining region (HC CDR1), a HC CDR2 and/or a HC CDR3 of SEQ ID NO: 15, SEQ ID NO: 23, SEQ ID NO: 24, or SEQ ID NO: 25; and/or
[0414] (ii) a light chain complementarity determining region 1 (LC CDR1), a LC CDR2, and/or a LC CDR3 of SEQ ID NO: 16, SEQ ID NO: 26, SEQ ID NO: 27, SEQ ID NO: 28, SEQ ID NO: 29, or SEQ ID NO: 30.

[0415] In some embodiments of any of the compositions disclosed herein, the anti-TCRβV antibody molecule comprises an antigen binding domain comprising a light chain variable region (VL) comprising one, two or all of a LC CDR1, a LC CDR2 and a LC CDR3 of SEQ ID NO: 16, SEQ ID NO: 26, SEQ ID NO: 27, SEQ ID NO: 28, SEQ ID NO: 29, or SEQ ID NO: 30.

[0416] In some embodiments of any of the compositions disclosed herein, the anti-TCRβV antibody molecule comprises an antigen binding domain comprising a heavy chain variable region (VH) comprising one, two or all of a HC CDR1, a HC CDR2 and a HC CDR3 of SEQ ID NO: 15, SEQ ID NO: 23, SEQ ID NO: 24, or SEQ ID NO: 25.

[0417] In some embodiments of any of the compositions disclosed herein, the anti-TCRβV antibody molecule comprises an antigen binding domain comprising:
[0418] (i) a VL comprising: a LC CDR1 amino acid sequence of SEQ ID NO: 20 (or an amino acid sequence with not more than 1, 2, 3 or 4 modifications, e.g., substitutions, additions or deletions thereof), a LC CDR2 amino acid sequence of SEQ ID NO:21 (or an amino acid sequence with not more than 1, 2, 3 or 4 modifications, e.g., substitutions, additions or deletions thereof), and/or a LC CDR3 amino acid sequence of SEQ ID NO:22 (or an amino acid sequence with not more than 1, 2, 3 or 4 modifications, e.g., substitutions, additions or deletions thereof); and/or
[0419] (ii) a VH comprising: a HC CDR1 amino acid sequence of SEQ ID NO: 17 (or an amino acid sequence with not more than 1, 2, 3 or 4 modifications, e.g., substitutions, additions or deletions thereof), a HC CDR2 amino acid sequence of SEQ ID NO:18 (or an amino acid sequence with not more than 1, 2, 3 or 4 modifications, e.g., substitutions, additions or deletions thereof), and/or a HC CDR3 amino acid sequence of SEQ ID NO:19 (or an amino acid sequence with not more than 1, 2, 3 or 4 modifications, e.g., substitutions, additions or deletions thereof).

[0420] In some embodiments of any of the compositions disclosed herein, the anti-TCRβV antibody molecule comprises an antigen binding domain comprising:
[0421] a variable heavy chain (VH) of SEQ ID NO: 23, SEQ ID NO: 24 or SEQ ID NO: 25, or a sequence having at least about 75%, 80%, 85%, 90%, 95%, or 99% sequence identity thereto; and/or
[0422] a variable light chain (VL) of SEQ ID NO: 26, SEQ ID NO: 27, SEQ ID NO: 28, SEQ ID NO: 29, or SEQ ID NO: 30, or a sequence having at least about 75%, 80%, 85%, 90%, 95%, or 99% sequence identity thereto.

[0423] In some embodiments of any of the compositions disclosed herein, the anti-TCRβV antibody molecule comprises a light chain comprising a framework region, e.g., framework region 1 (FR1), comprising one, two or all (e.g., three) of: (i) an Aspartic Acid at position 1, e.g., a substitution at position 1 according to Kabat numbering, e.g., a Alanine to Aspartic Acid substitution; or (ii) an Asparagine at position 2, e.g., a substitution at position 2 according to Kabat numbering, e.g., a Isoleucine to Asparagine substitution, a Serine to Asparagine substitution, or a Tyrosine to Asparagine substitution; or (iii) a Leucine at position 4, e.g., a substitution at position 4 according to Kabat numbering, e.g., a Methionine to Leucine substitution. In some embodiments, the substitution is relative to a human germline light chain framework region sequence.

[0424] In some embodiments of any of the compositions disclosed herein, the anti-TCRβV antibody molecule comprises a light chain comprising a framework region, e.g., framework region 3 (FR3), comprising one, two or all (e.g., three) of: (i) a Glycine as position 66, e.g., a substitution at position 66 according to Kabat numbering, e.g., a Lysine to Glycine substitution, or a Serine to Glycine substitution; or (ii) an Asparagine at position 69, e.g., a substitution at position 69 according to Kabat numbering, e.g., a Threonine to Asparagine substitution; or (iii) a Tyrosine at position 71, e.g., a substitution at position 71 according to Kabat numbering, e.g., a Phenylalanine to Tyrosine substitution, or an Alanine to Tyrosine substitution. In some embodiments, the substitution is relative to a human germline light chain framework region sequence.

[0425] In some embodiments of any of the compositions disclosed herein, the anti-TCRβV antibody molecule binds to TCRβ V12, e.g., TCRβ V12-4*01, TCRβ V12-3*01, or TCRβ V12-5*01. In some embodiments the anti-TCRβV antibody molecule binds to TCRβ V12-4*01 or TCRβ V12-3*01.

[0426] In some embodiments, TCRβ V12, e.g., TCRβ V12-4*01, TCRβ V12-3*01, or TCRβ V12-5*01 is recognized, e.g., bound, by SEQ ID NO: 15 and/or SEQ ID NO: 16. In some embodiments, TCRβ V12, e.g., TCRβ V12-4*01, TCRβ V12-3*01, or TCRβ V12-5*01, is recognized, e.g., bound, by any one of SEQ ID NOs 23-25, and/or any one of SEQ ID NO: 26-30A, or an amino acid sequence having at least about 75%, 80%, 85%, 90%, 95%, or 99% sequence identity thereto. In some embodiments TCRβ V12-4*01 is recognized, e.g., bound, by any one of SEQ ID NOs 23-25, and/or any one of SEQ ID NO: 26-30, or an amino acid sequence having at least about 75%, 80%, 85%, 90%, 95%, or 99% sequence identity thereto. In some embodiments TCRβ V12-3*01 is recognized, e.g., bound, by any one of SEQ ID NOs 23-25, and/or any one of SEQ ID NO: 26-30, or an amino acid sequence having at least about 75%, 80%, 85%, 90%, 95%, or 99% sequence identity thereto.

[0427] In some embodiments of any of the compositions disclosed herein, the anti-TCRβV antibody molecule comprises the anti-TCRβV antibody molecule comprises an antigen binding domain comprising a single chain Fv (scFv) or a Fab.

[0428] In some embodiments of any of the compositions disclosed herein, the anti-TCRβV antibody molecule comprises binds to a conformational or a linear epitope on the T cell.

[0429] In some embodiments of any of the compositions disclosed herein, the anti-TCRβV antibody molecule is a full antibody (e.g., an antibody that includes at least one, and preferably two, complete heavy chains, and at least one, and preferably two, complete light chains), or an antigen-binding fragment (e.g., a Fab, F(ab′)₂, Fv, a single chain Fv fragment, a single domain antibody, a diabody (dAb), a bivalent antibody, or bispecific antibody or fragment thereof, a single domain variant thereof, or a camelid antibody.

[0430] In some embodiments of any of the compositions disclosed herein, the anti-TCRβV antibody molecule comprises the anti-TCRβV antibody molecule comprises a heavy chain constant region chosen from IgG1, IgG2, IgG3, or IgG4, or a fragment thereof.

[0431] In some embodiments of any of the compositions disclosed herein, the anti-TCRβV antibody molecule comprises a light chain constant region chosen from the light chain constant regions of kappa or lambda, or a fragment thereof.

[0432] In some embodiments, the anti-TCRβV antibody molecule in a multispecific molecule disclosed herein is a first immune cell engager moiety. In some embodiments, the anti-TCRβV antibody molecule does not bind to TCRβ V12, or binds to TCRβ V12 with an affinity and/or binding specificity that is less than (e.g., less than about 10%, 20%, 30%, 40%, 50%, 60%, 70%, 80%, 90% or about 2-, 5-, or 10-fold) the affinity and/or binding specificity of the murine mAb Antibody B or a humanized version thereof (e.g., humanized mAb Antibody B-H.1 to B-H.6) as described in U.S. Pat. No. 5,861,155. In some embodiments, the anti-TCRβV antibody molecule binds to TCRβ V12 with an affinity and/or binding specificity that is greater than (e.g., greater than about 10%, 20%, 30%, 40%, 50%, 60%, 70%, 80%, 90% or about 2-, 5-, or 10-fold) the affinity and/or binding specificity of the murine mAb Antibody B or a humanized version thereof (e.g., humanized mAb Antibody B-H.1 to B-H.6) as described in U.S. Pat. No. 5,861,155. In some embodiments, the anti-TCRβV antibody molecule binds to a TCRβV region other than TCRβ V12 (e.g., TCRβV region as described herein, e.g., TCRβ V6 subfamily (e.g., TCRβ V6-5*01) with an affinity and/or binding specificity that is greater than (e.g., greater than about 10%, 20%, 30%, 40%, 50%, 60%, 70%, 80%, 90% or about 2-, 5-, or 10-fold) the affinity and/or binding specificity of the murine mAb Antibody B or a humanized version thereof (e.g., humanized mAb Antibody B-H.1 to B-H.6) as described in U.S. Pat. No. 5,861,155. In some embodiments, the anti-TCRβV antibody molecule does not comprise the CDRs of the murine mAb Antibody B.

[0433] In some embodiments, the anti-TCRβV antibody molecule in a multispecific molecule disclosed herein is a first immune cell engager moiety. In some embodiments, the anti-TCRβV antibody molecule does not bind to TCRβ V5-5*01 or TCRβ V5-1*01, or binds to TCRβ V5-5*01 or TCRβ V5-1*01 with an affinity and/or binding specificity that is less than (e.g., less than about 10%, 20%, 30%, 40%, 50%, 60%, 70%, 80%, 90% or about 2-, 5-, or 10-fold) the affinity and/or binding specificity of murine Antibody C or a humanized version thereof as described in U.S. Pat. No. 5,861,155. In some embodiments, the anti-TCRβV antibody molecule binds to TCRβ V5-5*01 or TCRβ V5-1*01 with an affinity and/or binding specificity that is greater than (e.g., greater than about 10%, 20%, 30%, 40%, 50%, 60%, 70%, 80%, 90% or about 2-, 5-, or 10-fold) the affinity and/or binding specificity of murine Antibody C or a humanized version thereof as described in U.S. Pat. No. 5,861,155. In some embodiments, the anti-TCRβV antibody molecule binds to a TCRβV region other than TCRβ V5-5*01 or TCRβ V5-1*01 (e.g., TCRβV region as described herein, e.g., TCRβ V6 subfamily (e.g., TCRβ V6-5*01) with an affinity and/or binding specificity that is greater than (e.g., greater than about 10%, 20%, 30%, 40%, 50%, 60%, 70%, 80%, 90% or about 2-, 5-, or 10-fold) the affinity and/or binding specificity of murine Antibody C or a humanized version thereof as described in U.S. Pat. No. 5,861,155. In some embodiments, the anti-TCRβV antibody molecule does not comprise the CDRs of murine Antibody C.

[0434] In some embodiments, the multispecific molecule further comprises a second immune cell engager moiety. In some embodiments, the first and/or second immune cell engager binds to and activates an immune cell, e.g., an effector cell. In some embodiments, the first and/or second immune cell engager binds to, but does not activate, an immune cell, e.g., an effector cell. In some embodiments, the second immune cell engager is chosen from an NK cell engager, a T cell engager, a B cell engager, a dendritic cell engager, or a macrophage cell engager, or a combination thereof. In some embodiments, the second immune cell engager comprises a T cell engager which binds to CD3, TCRa, TCRy, TCR, ICOS, CD28, CD27, HVEM, LIGHT, CD40, 4-1BB, OX40, DR3, GITR, CD30, TIMI, SLAM, CD2, or CD226.

[0435] In some embodiments, a multispecific molecule disclosed herein comprises an infectious disease-targeting moiety. In some embodiment, the infectious disease-targeting moiety comprises an antibody molecule (e.g., Fab or scFv), a receptor molecule (e.g., a receptor, a receptor fragment or functional variant thereof), or a ligand molecule (e.g., a ligand, a ligand fragment or functional variant thereof), or a combination thereof, that binds to an antigen from an infectious agent, e.g., a bacteria (e.g., Mycobacterium tuberculosis), virus (e.g., Epstein-Barr virus (EBV), influenza virus, human immunodeficiency virus (HIV), simian immunodeficiency virus (SIV), human cytomegalovirus (HCMV)), or eukaryotic infectious agent (e.g., a malaria parasite). In some embodiments, the infectious disease-targeting moiety binds to an antigen present on an infectious agent, e.g., a bacteria (e.g., Mycobacterium tuberculosis), virus (e.g., Epstein-Barr virus (EBV), influenza virus, human immunodeficiency virus (HIV), simian immunodeficiency virus (SIV), human cytomegalovirus (HCMV)), or eukaryotic infectious agent (e.g., a malaria parasite).

[0436] In some embodiments, the infectious disease-targeting antibody molecule binds to a conformational or a linear epitope on an antigen from an infectious agent, e.g., as described herein.

[0437] In some embodiments of any of the compositions or methods disclosed herein, the infectious disease-targeting moiety is an antigen, e.g., an infectious disease antigen, e.g., an antigen from a bacterium (e.g., Mycobacterium tuberculosis), virus (e.g., Epstein-Barr virus (EBV), influenza virus, human immunodeficiency virus (HIV), simian immunodeficiency virus (SIV), human cytomegalovirus (HCMV)), or eukaryotic infectious agent (e.g., a malaria parasite).

[0438] In some embodiments of any of the compositions or methods disclosed herein, the infectious disease-targeting moiety binds to an antigen chosen from: EBNA3 (e.g., 339-347), EBNA1 (e.g., 407-417), BZLF1 (e.g., 52-64), matrix protein (e.g., influenza virus matrix protein, e.g., 58-66), HIV Gag (e.g., HIV Gag p17, e.g., 77-85), HIV Env, HIV p24 capsid, SIV Tat (e.g., 28-35), SIV Gag (e.g., 181-189), or HCMV pp65 (e.g., 495-503).

[0439] In some embodiments of any of the compositions or methods disclosed herein, the infectious disease includes but not limited to: Epstein-Barr virus (EBV), influenza, human immunodeficiency virus (HIV), simian immunodeficiency virus (SIV), tuberculosis, malaria, or human cytomegalovirus (HCMV).

[0440] In some embodiments, a multispecific molecule disclosed herein further comprises a cytokine molecule, e.g., one or two cytokine molecules. In some embodiments, the cytokine molecule is chosen from interleukin-2 (IL-2), interleukin-7 (IL-7), interleukin-12 (IL-12), interleukin-15 (IL-15), interleukin-18 (IL-18), interleukin-21 (IL-21), or interferon gamma, or a fragment, variant or combination thereof. In some embodiments, is a monomer or a dimer. In some embodiments, the cytokine molecule further comprises a receptor dimerizing domain, e.g., an IL15Ralpha dimerizing domain. In some embodiments, the cytokine molecule (e.g., IL-15) and the receptor dimerizing domain (e.g., an IL15Ralpha dimerizing domain) are not covalently linked, e.g., are non-covalently associated.

[0441] In some embodiments, a multispecific molecule disclosed herein comprises:
[0442] (i) an anti-TCRβV antibody molecule (e.g., an anti-TCRβV antibody molecule as described herein); and
[0443] (ii) an infectious disease-targeting antibody molecule (e.g., an antibody molecule that binds to an antigen as described herein, e.g., chosen from one or more of EBNA3 (e.g., 339-347), EBNA1 (e.g., 407-417), BZLF1 (e.g., 52-64), matrix protein (e.g., influenza virus matrix protein, e.g., 58-66), HIV Gag (e.g., HIV Gag p17, e.g., 77-85), HIV Env, HIV p24 capsid, SIV Tat (e.g., 28-35), SIV Gag (e.g., 181-189), or HCMV pp65 (e.g., 495-503)).

[0444] In some embodiments, a multispecific molecule disclosed herein further comprises an immunoglobulin constant region (e.g., Fc region) chosen from the heavy chain constant regions of IgG1, IgG2, and IgG4, more particularly, the heavy chain constant region of human IgG1, IgG2 or IgG4. In some embodiments, the immunoglobulin constant region (e.g., an Fc region) is linked, e.g., covalently linked to, one or more of an infectious disease-targeting moiety (e.g., which can bind to one or more of EBNA3 (e.g., 339-347), EBNA1 (e.g., 407-417), BZLF1 (e.g., 52-64), matrix protein (e.g., influenza virus matrix protein, e.g., 58-66), HIV Gag (e.g., HIV Gag p17, e.g., 77-85), HIV Env, HIV p24 capsid, SIV Tat (e.g., 28-35), SIV Gag (e.g., 181-189), or HCMV pp65 (e.g., 495-503)), the immune cell engager, the cytokine molecule, or the stromal modifying moiety. In some embodiments, an interface of a first and second immunoglobulin chain constant regions (e.g., Fc region) is altered, e.g., mutated, to increase or decrease dimerization, e.g., relative to a non-engineered interface. In some embodiments, the dimerization of the immunoglobulin chain constant region (e.g., Fc region) is enhanced by providing an Fc interface of a first and a second Fc region with one or more of: a paired cavity-protuberance (“knob-in-a hole”), an electrostatic interaction, or a strand-exchange, such that a greater ratio of heteromultimer:homomultimer forms, e.g., relative to a non-engineered interface. In some embodiments,

[0445] In some embodiments, a multispecific molecule disclosed herein further comprises a linker, e.g., a linker described herein, optionally wherein the linker is selected from: a cleavable linker, a non-cleavable linker, a peptide linker, a flexible linker, a rigid linker, a helical linker, or a non-helical linker.

[0446] In some embodiments, the multispecific molecule comprises at least two non-contiguous polypeptide chains.

[0447] In some embodiments, the multispecific molecule comprises the following configuration:

A, B-[dimerization module]-C, -D

wherein:
[0448] (1) the dimerization module comprises an immunoglobulin constant domain, e.g., a heavy chain constant domain (e.g., a homodimeric or heterodimeric heavy chain constant region, e.g., an Fc region), or a constant domain of an immunoglobulin variable region (e.g., a Fab region); and
[0449] (2) A, B, C, and D are independently absent; (i) an antigen binding domain that preferentially binds to a first immune cell engager comprising an anti-TCRβV antibody molecule disclosed herein; (ii) an infectious disease-targeting moiety (e.g., as described herein), (iii) a second immune cell engager chosen from a T cell engager, an NK cell engager, a B cell engager, a dendritic cell engager, or a macrophage cell engager; (iv) a cytokine molecule; or (v) a stromal modifying moiety, provided that:
[0450] at least one, two, or three of A, B, C, and D comprises an antigen binding domain that preferentially binds to a TCRβV region disclosed herein, and
[0451] any of the remaining A, B, C, and D is absent or comprises one of an infectious disease-targeting moiety, a second immune cell engager, a cytokine molecule, or a stromal modifying moiety.

[0452] In some embodiments, the dimerization module comprises one or more immunoglobulin chain constant regions (e.g., Fc regions) comprising one or more of: a paired cavity-protuberance (“knob-in-a hole”), an electrostatic interaction, or a strand-exchange. In some embodiments, the one or more immunoglobulin chain constant regions (e.g., Fc regions) comprise an amino acid substitution at a position chosen from one or more of 347, 349, 350, 351, 366, 368, 370, 392, 394, 395, 397, 398, 399, 405, 407, or 409, e.g., of the Fc region of human IgG1. In some embodiments, the one or more immunoglobulin chain constant regions (e.g., Fc regions) comprise an amino acid substitution chosen from: T366S, L368A, or Y407V (e.g., corresponding to a cavity or hole), or T366W (e.g., corresponding to a protuberance or knob), or a combination thereof.

[0453] In some embodiments, the multispecific molecule further comprises a linker, e.g., a linker between one or more of: the antigen binding domain of an anti-TCRβV antibody molecule disclosed herein and the infectious disease-targeting moiety; the antigen binding domain of an anti-TCRβV antibody molecule disclosed herein and the second immune cell engager, the antigen binding domain of an anti-TCRβV antibody molecule disclosed herein and the cytokine molecule, the antigen binding domain of an anti-TCRβV antibody molecule disclosed herein and the stromal modifying moiety, the second immune cell engager and the cytokine molecule, the second immune cell engager and the stromal modifying moiety, the cytokine molecule and the stromal modifying moiety, the antigen binding domain of an anti-TCRβV antibody molecule disclosed herein and the dimerization module, the second immune cell engager and the dimerization module, the cytokine molecule and the dimerization module, the stromal modifying moiety and the dimerization module, the infectious disease-targeting moiety and the dimerization module, the infectious disease-targeting moiety and the cytokine molecule, the infectious disease-targeting moiety and the second immune cell engager, or the infectious disease-targeting moiety and the antigen binding domain of an anti-TCRβV antibody molecule disclosed herein. In some embodiments, the linker is chosen from: a cleavable linker, a non-cleavable linker, a peptide linker, a flexible linker, a rigid linker, a helical linker, or a non-helical linker. In some embodiments, the linker is a peptide linker. In some embodiments, the peptide linker comprises Gly and Ser. In some embodiments, the peptide linker comprises an amino acid sequence chosen from SEQ ID NOs: 3460-3463 or 3467-3470.

[0454] In another aspect, the disclosure provides an isolated nucleic acid molecule comprising a nucleotide sequence encoding an anti-TCRβV antibody molecule disclosed herein, or a nucleotide sequence having at least 75%, 80%, 85%, 90%, 95%, or 99% identity thereto.

[0455] In another aspect, the disclosure provides an isolated nucleic acid molecule comprising a nucleotide sequence encoding a multispecific molecule disclosed herein, or a nucleotide sequence having at least 75%, 80%, 85%, 90%, 95%, or 99% identity thereto.

[0456] In another aspect, the disclosure provides a method of making, e.g., producing, an anti-TCRβV antibody molecule, a multispecific molecule described herein, comprising culturing a host cell described herein, under suitable conditions. In some embodiments of a method of making a multispecific molecule, the conditions comprise, e.g., conditions suitable for gene expression and/or homo- or heterodimerization.

[0457] In another aspect, the disclosure provides a pharmaceutical composition comprising an anti-TCRβV antibody molecule, or a multispecific molecule described herein, and a pharmaceutically acceptable carrier, excipient, or stabilizer.

[0458] In an aspect, provided herein is a method of treating a disease e.g., an infectious disease, in a subject comprising administering to the subject an effective amount, e.g., a therapeutically effective amount, of an anti-TCRβV antibody molecule or a multispecific molecule comprising an anti-TCRβV antibody molecule disclosed herein, thereby treating the disease.

[0459] In a related aspect, provided herein is a composition comprising an anti-TCRβV antibody molecule or a multispecific molecule comprising an anti-TCRβV antibody molecule disclosed herein, for use in the treatment of a disease, e.g., an infectious disease, in a subject.

[0460] In some embodiments, the method further comprises administering a second agent, e.g., therapeutic agent, e.g., as described herein. In some embodiments, second agent comprises a therapeutic agent. In some embodiments, therapeutic agent is a biologic agent.

[0461] In another aspect, provided herein is a method of targeting, e.g., directing or re-directing, a therapy, e.g., treatment, to a T cell, e.g., in a subject, e.g., having a disease, e.g., an infectious disease, comprising administering an effective amount of: (i) an anti-TCRβV antibody disclosed herein; and (ii) the therapy, e.g., an infectious disease-targeting therapy (e.g., an antibody that binds to an antigen as described herein), e.g., as described herein, thereby targeting the T cell.

[0462] In some embodiments, (i) and (ii) are conjugated, e.g., linked.

[0463] In some embodiments, (i) and (ii) are administered simultaneously or concurrently.

[0464] In some embodiments, the method results in: reduced cytokine release syndrome (CRS) (e.g., lesser duration of CRS or no CRS), or a reduced severity of CRS (e.g., absence of severe CRS, e.g., CRS grade 4 or 5) compared to administration of (ii) alone. In some embodiments, CRS is assessed by an assay of Example 3.

[0465] In yet another aspect, the disclosure provides, a method of targeting a T cell, e.g., in a subject having a disease, e.g., an infectious disease, with an anti-TCRβV antibody disclosed herein or a multispecific molecule comprising an anti-TCRβV antibody disclosed herein.

[0466] In another aspect, the disclosure provides a method of treating, e.g., preventing or reducing, cytokine release syndrome (CRS) in a subject, e.g., CRS associated with a treatment, e.g., a previously administered treatment, comprising administering to the subject an effective amount of an anti-TCRβV antibody disclosed herein or a multispecific molecule comprising an anti-TCRβV antibody disclosed herein, wherein, the subject has a disease, e.g., an infectious disease, thereby treating, e.g., preventing or reducing, CRS in the subject

[0467] In a related aspect, the disclosure provides a composition comprising an anti-TCRβV antibody disclosed herein or a multispecific molecule comprising an anti-TCRβV antibody disclosed herein, for use in the treatment, e.g., prevention or reduction, of cytokine release syndrome (CRS) in a subject, e.g., CRS associated with a treatment, e.g., a previously administered treatment, comprising administering to the subject an effective amount of the anti-TCRβV antibody, wherein the subject has a disease, e.g., an infectious disease.

[0468] In some embodiments of a method or composition for use disclosed herein, the anti-TCRβV antibody is administered concurrently with or after the administration of the treatment associated with CRS.

[0469] In some embodiments of any of the methods disclosed herein, the anti-TCRβV antibody molecule comprises an antigen binding domain comprising:
[0470] (i) a heavy chain complementarity determining region 1 (HC CDR1), a heavy chain complementarity determining region 2 (HC CDR2) and/or a heavy chain complementarity determining region 3 (HC CDR3) of SEQ ID NO: 1 or SEQ ID NO: 9; or
[0471] (ii) a light chain complementarity determining region 1 (LC CDR1), a light chain complementarity determining region 2 (LC CDR2), and/or a light chain complementarity determining region 3 (LC CDR3) of SEQ ID NO: 2, SEQ ID NO: 10, or SEQ ID NO: 11.

[0472] In some embodiments of any of the methods disclosed herein, the anti-TCRβV antibody molecule comprises an antigen binding domain comprising a light chain variable region (VL) comprising one, two or all (e.g., three) of a LC CDR1, a LC CDR2 and a LC CDR3 of SEQ ID NO: 2, SEQ ID NO: 10, or SEQ ID NO: 11.

[0473] In some embodiments of any of the methods disclosed herein, the anti-TCRβV antibody molecule comprises an antigen binding domain comprising a heavy chain variable region (VH) comprising one, two or all (e.g., three) of a HC CDR1, a HC CDR2 and a HC CDR3 of SEQ ID NO:1 or SEQ ID NO: 9.

[0474] In some embodiments of any of the methods disclosed herein, the anti-TCRβV antibody molecule comprises an antigen binding domain comprising:
[0475] (i) a VL comprising: a LC CDR1 amino acid sequence of SEQ ID NO: 6 (or an amino acid sequence with not more than 1, 2, 3 or 4 modifications, e.g., substitutions, additions or deletions thereof), a LC CDR2 amino acid sequence of SEQ ID NO: 7 (or an amino acid sequence with not more than 1, 2, 3 or 4 modifications, e.g., substitutions, additions or deletions thereof), and/or a LC CDR3 amino acid sequence of SEQ ID NO: 8 (or an amino acid sequence with not more than 1, 2, 3 or 4 modifications, e.g., substitutions, additions or deletions thereof); and/or
[0476] (ii) a VH comprising: a HC CDR1 amino acid sequence of SEQ ID NO: 3 (or an amino acid sequence with not more than 1, 2, 3 or 4 modifications, e.g., substitutions, additions or deletions thereof), a HC CDR2 amino acid sequence of SEQ ID NO: 4 (or an amino acid sequence with not more than 1, 2, 3 or 4 modifications, e.g., substitutions, additions or deletions thereof), and/or a HC CDR3 amino acid sequence of SEQ ID NO: 5 (or an amino acid sequence with not more than 1, 2, 3 or 4 modifications, e.g., substitutions, additions or deletions thereof).

[0477] In some embodiments of any of the methods disclosed herein, the anti-TCRβV antibody molecule comprises an antigen binding domain comprising: a variable heavy chain (VH) of SEQ ID NO: 9, or a sequence having at least about 75%, 80%, 85%, 90%, 95%, or 99% sequence identity thereto; and/or a variable light chain (VL) of SEQ ID NO: 10 or SEQ ID NO: 11, or a sequence having at least about 75%, 80%, 85%, 90%, 95%, or 99% sequence identity thereto.

[0478] In some embodiments of any of the methods disclosed herein, the anti-TCRβV antibody molecule comprises an antigen binding domain comprising the VH amino acid sequence of SEQ ID NO: 9 and the VL amino acid sequence of SEQ ID NO: 10.

[0479] In some embodiments of any of the methods disclosed herein, the anti-TCRβV antibody molecule comprises an antigen binding domain comprising the VH amino acid sequence of SEQ ID NO: 9 and the VL amino acid sequence of SEQ ID NO: 11.

[0480] In some embodiments of any of the methods disclosed herein, the anti-TCRβV antibody molecule comprises a heavy chain comprising a framework region, e.g., framework region 3 (FR3), comprising one or both of: (i) a Threonine at position 73, e.g., a substitution at position 73 according to Kabat numbering, e.g., a Glutamic Acid to Threonine substitution; or (ii) a Glycine at position, e.g., a substitution at position 94 according to Kabat numbering, e.g., a Arginine to Glycine substitution. In some embodiments, the substitution is relative to a human germline heavy chain framework region sequence.

[0481] In some embodiments of any of the methods disclosed herein, the anti-TCRβV antibody molecule comprises a light chain comprising a framework region, e.g., framework region 1 (FR1), comprising a Phenylalanine at position 10, e.g., a substitution at position 10 according to Kabat numbering, e.g., a Serine to Phenyalanine substitution. In some embodiments, the substitution is relative to a human germline light chain framework region sequence.

[0482] In some embodiments of any of the methods disclosed herein, the anti-TCRβV antibody molecule comprises a light chain comprising a framework region, e.g., framework region 2 (FR2), comprising one or both of: (i) a Histidine at position 36, e.g., a substitution at position 36 according to Kabat numbering, e.g., a Tyrosine to Histidine substitution; or (ii) an Alanine at position 46, e.g., a substitution at position 46 according to Kabat numbering, e.g., a Arginine to Alanine substitution. In some embodiments, the substitution is relative to a human germline light chain framework region sequence.

[0483] In some embodiments of any of the methods disclosed herein, the anti-TCRβV antibody molecule comprises a light chain comprising a framework region, e.g., framework region 3 (FR3), comprising a Phenylalanine at position 87, e.g., a substitution at position 87 according to Kabat numbering, e.g., a Tyrosine to Phenyalanine substitution. In some embodiments, the substitution is relative to a human germline light chain framework region sequence.

[0484] In some embodiments of any of the methods disclosed herein, the anti-TCRβV antibody molecule binds to TCRβ V6, e.g., TCRβ V6-4*01, TCRβ V6-4*02, TCRβ V6-9*01, TCRβ V6-8*01, TCRβ V6-5*01, TCRβ V6-6*02, TCRβ V6-6*01, TCRβ V6-2*01, TCRβ V6-3*01 or TCRβ V6-1*01. In some embodiments the anti-TCRβV antibody molecule binds to TCRβ V6-5*01.

[0485] In some embodiments, TCRβ V6, e.g., TCRβ V6-4*01, TCRβ V6-4*02, TCRβ V6-9*01, TCRβ V6-8*01, TCRβ V6-5*01, TCRβ V6-6*02, TCRβ V6-6*01, TCRβ V6-2*01, TCRβ V6-3*01 or TCRβ V6-1*01, is recognized, e.g., bound, by SEQ ID NO: 1 and/or SEQ ID NO: 2. In some embodiments, TCRβ V6, e.g., TCRβ V6-4*01, TCRβ V6-4*02, TCRβ V6-9*01, TCRβ V6-8*01, TCRβ V6-5*01, TCRβ V6-6*02, TCRβ V6-6*01, TCRβ V6-2*01, TCRβ V6-3*01 or TCRβ V6-1*01, is recognized, e.g., bound, by SEQ ID NO: 9 and/or SEQ ID NO: 10. In some embodiments, TCRβ V6, e.g., TCRβ V6-4*01, TCRβ V6-4*02, TCRβ V6-9*01, TCRβ V6-8*01, TCRβ V6-5*01, TCRβ V6-6*02, TCRβ V6-6*01, TCRβ V6-2*01, TCRβ V6-3*01 or TCRβ V6-1*01, is recognized, e.g., bound, by SEQ ID NO: 9 and/or SEQ ID NO: 11. In some embodiments, TCRβ V6-5*01 is recognized, e.g., bound by SEQ ID NO: 9 and/or SEQ ID NO: 10, or a sequence having at least about 75%, 80%, 85%, 90%, 95%, or 99% sequence identity thereto. In some embodiments, TCRβ V6-5*01 is recognized, e.g., bound by SEQ ID NO: 9 and/or SEQ ID NO: 11, or a sequence having at least about 75%, 80%, 85%, 90%, 95%, or 99% sequence identity thereto.

[0486] In some embodiments of any of the methods disclosed herein, the anti-TCRβV antibody molecule comprises an antigen binding domain comprising:
[0487] (i) a heavy chain complementarity determining region (HC CDR1), a HC CDR2 and/or a HC CDR3 of SEQ ID NO: 15, SEQ ID NO: 23, SEQ ID NO: 24, or SEQ ID NO: 25; and/or
[0488] (ii) a light chain complementarity determining region 1 (LC CDR1), a LC CDR2, and/or a LC CDR3 of SEQ ID NO: 16, SEQ ID NO: 26, SEQ ID NO: 27, SEQ ID NO: 28, SEQ ID NO: 29, or SEQ ID NO: 30.

[0489] In some embodiments of any of the methods disclosed herein, the anti-TCRβV antibody molecule comprises an antigen binding domain comprising a light chain variable region (VL) comprising one, two or all of a LC CDR1, a LC CDR2 and a LC CDR3 of SEQ ID NO: 16, SEQ ID NO: 26, SEQ ID NO: 27, SEQ ID NO: 28, SEQ ID NO: 29, or SEQ ID NO: 30.

[0490] In some embodiments of any of the methods disclosed herein, the anti-TCRβV antibody molecule comprises an antigen binding domain comprising a heavy chain variable region (VH) comprising one, two or all of a HC CDR1, a HC CDR2 and a HC CDR3 of SEQ ID NO: 15, SEQ ID NO: 23, SEQ ID NO: 24, or SEQ ID NO: 25.

[0491] In some embodiments of any of the methods disclosed herein, the anti-TCRβV antibody molecule comprises an antigen binding domain comprising:
[0492] (i) a VL comprising: a LC CDR1 amino acid sequence of SEQ ID NO: 20 (or an amino acid sequence with not more than 1, 2, 3 or 4 modifications, e.g., substitutions, additions or deletions thereof), a LC CDR2 amino acid sequence of SEQ ID NO:21 (or an amino acid sequence with not more than 1, 2, 3 or 4 modifications, e.g., substitutions, additions or deletions thereof), and/or a LC CDR3 amino acid sequence of SEQ ID NO: 22 (or an amino acid sequence with not more than 1, 2, 3 or 4 modifications, e.g., substitutions, additions or deletions thereof); and/or (ii) a VH comprising: a HC CDR1 amino acid sequence of SEQ ID NO: 17 (or an amino acid sequence with not more than 1, 2, 3 or 4 modifications, e.g., substitutions, additions or deletions thereof), a HC CDR2 amino acid sequence of SEQ ID NO:18 (or an amino acid sequence with not more than 1, 2, 3 or 4 modifications, e.g., substitutions, additions or deletions thereof), and/or a HC CDR3 amino acid sequence of SEQ ID NO:19 (or an amino acid sequence with not more than 1, 2, 3 or 4 modifications, e.g., substitutions, additions or deletions thereof).

[0493] In some embodiments of any of the compositions disclosed herein, the anti-TCRβV antibody molecule comprises an antigen binding domain comprising:
[0494] a variable heavy chain (VH) of SEQ ID NO: 23, SEQ ID NO: 24, or SEQ ID NO: 25, or a sequence having at least about 75%, 80%, 85%, 90%, 95%, or 99% sequence identity thereto; and/or
[0495] a variable light chain (VL) of SEQ ID NO: 26, SEQ ID NO: 27, SEQ ID NO: 28, SEQ ID NO: 29, or SEQ ID NO:30, or a sequence having at least about 75%, 80%, 85%, 90%, 95%, or 99% sequence identity thereto.

[0496] In some embodiments of any of the methods disclosed herein, the anti-TCRβV antibody molecule comprises a light chain comprising a framework region, e.g., framework region 1 (FR1), comprising one, two or all (e.g., three) of: (i) an Aspartic Acid at position 1, e.g., a substitution at position 1 according to Kabat numbering, e.g., a Alanine to Aspartic Acid substitution; or (ii) an Asparagine at position 2, e.g., a substitution at position 2 according to Kabat numbering, e.g., a Isoleucine to Asparagine substitution, a Serine to Asparagine substitution, or a Tyrosine to Asparagine substitution; or (iii) a Leucine at position 4, e.g., a substitution at position 4 according to Kabat numbering, e.g., a Methionine to Leucine substitution. In some embodiments, the substitution is relative to a human germline light chain framework region sequence.

[0497] In some embodiments of any of the methods disclosed herein, the anti-TCRβV antibody molecule comprises a light chain comprising a framework region, e.g., framework region 3 (FR3), comprising one, two or all (e.g., three) of: (i) a Glycine as position 66, e.g., a substitution at position 66 according to Kabat numbering, e.g., a Lysine to Glycine substitution, or a Serine to Glycine substitution; or (ii) an Asparagine at position 69, e.g., a substitution at position 69 according to Kabat numbering, e.g., a Threonine to Asparagine substitution; or (iii) a Tyrosine at position 71, e.g., a substitution at position 71 according to Kabat numbering, e.g., a Phenylalanine to Tyrosine substitution, or an Alanine to Tyrosine substitution. In some embodiments, the substitution is relative to a human germline light chain framework region sequence.

[0498] In some embodiments of any of the methods disclosed herein, the anti-TCRβV antibody molecule binds to TCRβ V12, e.g., TCRβ V12-4*01, TCRβ V12-3*01, or TCRβ V12-5*01. In some embodiments the anti-TCRβV antibody molecule binds to TCRβ V12-4*01 or TCRβ V12-3*01.

[0499] In some embodiments, TCRβ V12, e.g., TCRβ V12-4*01, TCRβ V12-3*01, or TCRβ V12-5*01 is recognized, e.g., bound, by SEQ ID NO: 15 and/or SEQ ID NO: 16. In some embodiments, TCRβ V12, e.g., TCRβ V12-4*01, TCRβ V12-3*01, or TCRβ V12-5*01, is recognized, e.g., bound, by any one of SEQ ID NOs 23-25, and/or any one of SEQ ID NO: 26-30A, or an amino acid sequence having at least about 75%, 80%, 85%, 90%, 95%, or 99% sequence identity thereto. In some embodiments TCRβ V12-4*01 is recognized, e.g., bound, by any one of SEQ ID NOs 23-25, and/or any one of SEQ ID NO: 26-30, or an amino acid sequence having at least about 75%, 80%, 85%, 90%, 95%, or 99% sequence identity thereto. In some embodiments TCRβ V12-3*01 is recognized, e.g., bound, by any one of SEQ ID NOs 23-25, and/or any one of SEQ ID NO: 26-30, or an amino acid sequence having at least about 75%, 80%, 85%, 90%, 95%, or 99% sequence identity thereto.

[0500] In some embodiments of any of the methods disclosed herein, the anti-TCRβV antibody molecule comprises the anti-TCRβV antibody molecule comprises an antigen binding domain comprising a single chain Fv (scFv) or a Fab.

[0501] In some embodiments of any of the methods disclosed herein, the anti-TCRβV antibody molecule comprises binds to a conformational or a linear epitope on the T cell.

[0502] In some embodiments of any of the methods disclosed herein, the anti-TCRβV antibody molecule is a full antibody (e.g., an antibody that includes at least one, and preferably two, complete heavy chains, and at least one, and preferably two, complete light chains), or an antigen-binding fragment (e.g., a Fab, F(ab′)₂, Fv, a single chain Fv fragment, a single domain antibody, a diabody (dAb), a bivalent antibody, or bispecific antibody or fragment thereof, a single domain variant thereof, or a camelid antibody.

[0503] In some embodiments of any of the methods disclosed herein, the anti-TCRβV antibody molecule comprises the anti-TCRβV antibody molecule comprises a heavy chain constant region chosen from IgG1, IgG2, IgG3, or IgG4, or a fragment thereof.

[0504] In some embodiments of any of the methods disclosed herein, the anti-TCRβV antibody molecule comprises a light chain constant region chosen from the light chain constant regions of kappa or lambda, or a fragment thereof.

[0505] In some embodiments of any of the methods disclosed herein, the anti-TCRβV antibody molecule does not bind to TCRβ V12, or binds to TCRβ V12 with an affinity and/or binding specificity that is less than (e.g., less than about 10%, 20%, 30%, 40%, 50%, 60%, 70%, 80%, 90% or about 2-, 5-, or 10-fold) the affinity and/or binding specificity of the murine mAb Antibody B or a humanized version thereof (e.g., humanized mAb Antibody B-H.1 to B-H.6) as described in U.S. Pat. No. 5,861,155.

[0506] In some embodiments of any of the methods disclosed herein, the anti-TCRβV antibody molecule binds to TCRβ V12 with an affinity and/or binding specificity that is greater than (e.g., greater than about 10%, 20%, 30%, 40%, 50%, 60%, 70%, 80%, 90% or about 2-, 5-, or 10-fold) the affinity and/or binding specificity of the murine mAb Antibody B or a humanized version thereof (e.g., humanized mAb Antibody B-H.1 to B-H.6) as described in U.S. Pat. No. 5,861,155.

[0507] In some embodiments of any of the methods disclosed herein, the anti-TCRβV antibody molecule binds to a TCRβV region other than TCRβ V12 (e.g., TCRβV region as described herein, e.g., TCRβ V6 subfamily (e.g., TCRβ V6-5*01) with an affinity and/or binding specificity that is greater than (e.g., greater than about 10%, 20%, 30%, 40%, 50%, 60%, 70%, 80%, 90% or about 2-, 5-, or 10-fold) the affinity and/or binding specificity of the murine mAb Antibody B or a humanized version thereof (e.g., humanized mAb Antibody B-H.1 to B-H.6) as described in U.S. Pat. No. 5,861,155.

[0508] In some embodiments of any of the methods disclosed herein, the anti-TCRβV antibody molecule does not comprise the CDRs of the murine mAb Antibody B.

[0509] In some embodiments of any of the methods disclosed herein, the anti-TCRβV antibody molecule does not bind to TCRβ V5-5*01 or TCRβ V5-1*01, or binds to TCRβ V5-5*01 or TCRβ V5-1*01 with an affinity and/or binding specificity that is less than (e.g., less than about 10%, 20%, 30%, 40%, 50%, 60%, 70%, 80%, 90% or about 2-, 5-, or 10-fold) the affinity and/or binding specificity of murine Antibody C or a humanized version thereof as described in U.S. Pat. No. 5,861,155.

[0510] In some embodiments of any of the methods disclosed herein, the anti-TCRβV antibody molecule binds to TCRβ V5-5*01 or TCRβ V5-1*0lwith an affinity and/or binding specificity that is greater than (e.g., greater than about 10%, 20%, 30%, 40%, 50%, 60%, 70%, 80%, 90% or about 2-, 5-, or 10-fold) the affinity and/or binding specificity of murine Antibody C or a humanized version thereof as described in U.S. Pat. No. 5,861,155.

[0511] In some embodiments of any of the methods disclosed herein, the anti-TCRβV antibody molecule binds to a TCRβV region other than TCRβ V5-5*01 or TCRβ V5-1*01 (e.g., TCRβV region as described herein, e.g., TCRβ V6 subfamily (e.g., TCRβ V6-5*01) with an affinity and/or binding specificity that is greater than (e.g., greater than about 10%, 20%, 30%, 40%, 50%, 60%, 70%, 80%, 90% or about 2-, 5-, or 10-fold) the affinity and/or binding specificity of murine Antibody C or a humanized version thereof as described in U.S. Pat. No. 5,861,155.

[0512] In some embodiments of any of the methods disclosed herein, the anti-TCRβV antibody molecule does not comprise the CDRs of murine Antibody C.

[0513] In some embodiments of a method or composition for use disclosed herein, the disease is an infectious disease chosen from: Epstein-Barr virus (EBV), influenza, human immunodeficiency virus (HIV), simian immunodeficiency virus (SIV), tuberculosis, malaria, or human cytomegalovirus (HCMV), or a combination thereof.

[0514] Unless otherwise defined, all technical and scientific terms used herein have the same meaning as commonly understood by one of ordinary skill in the art to which this invention belongs. Although methods and materials similar or equivalent to those described herein can be used in the practice or testing of the present invention, suitable methods and materials are described below. All publications, patent applications, patents, and other references mentioned herein are incorporated by reference in their entirety. In the case of conflict, the present specification, including definitions, will control. In addition, the materials, methods, and examples are illustrative only and are not intended to be limiting.

[0515] Other features and advantages of the invention will be apparent from the following detailed description and claims.

### BRIEF DESCRIPTION OF THE DRAWINGS

[0516] FIGS. 1A-1B shows the alignment of the Antibody A source mouse VH and VL framework 1, CDR 1, framework 2, CDR 2, framework 3, CDR3, and framework 4 regions with their respective humanized sequences. Kabat CDRs are shown in bold, Chothia CDRs are shown in italics, and combined CDRs are shown in boxes. The framework positions that were back mutated are double underlined. FIG. 1A shows VH sequences for murine Antibody A (SEQ ID NO: 1) and humanized Antibody A-H (SEQ ID NO: 9). FIG. 1B shows VL sequences for murine Antibody A (SEQ ID NO: 2) and humanized Antibody A-H (SEQ ID NO: 10 and SEQ ID NO: 11).

[0517] FIGS. 2A-2B shows the alignment of the Antibody B source mouse VH and VL framework 1, CDR 1, framework 2, CDR 2, framework 3, CDR3, and framework 4 regions with their respective humanized sequences. Kabat CDRs are shown in bold, Chothia CDRs are shown in italics, and combined CDRs are shown in boxes. The framework positions that were back mutated are double underlined. FIG. 2A shows the VH sequence for murine Antibody B (SEQ ID NO: 15) and humanized VH sequences B-H.1A to B-H.1C (SEQ ID NOs: 23-25). FIG. 2B shows the VL sequence for murine Antibody B (SEQ ID NO: 16) and humanized VL sequences B-H.1D to B-H.1H (SEQ ID NOs: 26-30).

[0518] FIG. 3 depicts the phylogenetic tree of TCRBV gene family and subfamilies with corresponding antibodies mapped. Subfamily identities are as follows: Subfamily A: TCRβ V6; Subfamily B: TCRβ V10; Subfamily C: TCRβ V12; Subfamily D: TCRβ V5; Subfamily E: TCRβ V7; Subfamily F: TCRβ V11; Subfamily G: TCRβ V14; Subfamily H: TCRβ V16; Subfamily I:TCRβ V18; Subfamily J:TCRβ V9; Subfamily K: TCRβ V13; Subfamily L: TCRβ V4; Subfamily M:TCRβ V3; Subfamily N:TCRβ V2; Subfamily 0:TCRβ V15; Subfamily P: TCRβ V30; Subfamily Q: TCRβ V19; Subfamily R:TCRβ V27; Subfamily S:TCRβ V28; Subfamily T: TCRβ V24; Subfamily U: TCRβ V20; Subfamily V: TCRβ V25; and Subfamily W:TCRβ V29 subfamily. Subfamily members are described in detail herein in the Section titled “TCR beta V (TCRβV)”.

[0519] FIGS. 4A-4C show human CD3+T cells activated by anti-TCR Vβ13.1 antibody (A-H.1) for 6-days. Human CD3+T cells were isolated using magnetic-bead separation (negative selection) and activated with immobilized (plate-coated) anti-TCR Vβ13.1 (A-H.1) or anti-CD3E (OKT3) antibodies at 100 nM for 6 days. FIG. 4A shows two scatter plots (left: activated with OKT3; and right: activated with A-H.1) of expanded T cells assessed for TCR Vβ13.1 surface expression using anti-TCR Vβ13.1 (A-H.1) followed by a secondary fluorochrome- conjugated antibody for flow cytometry analysis. FIG. 4B shows percentage (%) of TCR Vβ13.1 positive T cells activated by anti-TCR Vβ13.1 (A-H.1) or anti-CD3e (OKT3) plotted against total T cells (CD3+). FIG. 4C shows relative cell count acquired by counting the number of events in each T cell subset gate (CD3 or TCR Vβ13.1) for 20 seconds at a constant rate of 60 μl/min. Data shown as mean value from 3 donors.

[0520] FIGS. 5A-5B show cytolytic activity of human CD3+T cells activated by anti-TCR Vβ13.1 antibody (A-H.1) against transformed cell line RPMI 8226. FIG. 5A depicts target cell lysis of human CD3+T cells activated with A-H.lor OKT3. Human CD3+T cells were isolated using magnetic-bead separation (negative selection) and activated with immobilized (plate-coated) A-H.1 or OKT3 at the indicated concentrations for 4 days prior to co-culture with RPMI 8226 cells at a (E:T) ratio of 5:1 for 2 days. Samples were next analyzed for cell lysis of RPMI 8226 cells by FACS staining for CFSE/CD138-labeled, and membrane-impermeable DNA dyes (DRAQ7) using flow cytometry analysis. FIG. 5B shows target cell lysis of human CD3+T cells activated with A-H.1 or OKT3 incubated with RPMI-8226 at a (E:T) ratio of 5:1 for 6 days followed by cell lysis analysis of RPMI 8226 cells as described above. Percentage (%) target cell lysis was determined by normalizing to basal target cell lysis (i.e. without antibody treatment) using the following formula, [(x−basal)/(100%−basal), where xis cell lysis of sample]. Data shown is a representative of n=1 donor.

[0521] FIGS. 6A-6B show IFNγ production by human PBMCs activated with the indicated antibodies. Human PBMCs were isolated from whole blood from the indicated number of donors, followed by solid-phase (plate-coated) stimulation with the indicated antibodies at 100Nm. Supernatant was collected on Days 1, 2, 3, 5, or 6. FIG. 6A is a graph comparing the production of IFNγ in human PBMCs activated with the antibodies indicated activated with anti-TCR Vβ13.1 antibodies (A-H.1 or A-H.2) or anti-CD3e antibodies (OKT3 or SP34-2) on Day 1, 2, 3, 5, or 6 post-activation. FIG. 6B shows IFNγ production in human PBMCs activated with the antibodies indicated activated with the indicated anti-TCR Vβ13.1 antibodies or anti-CD3e antibody (OKT3) on Day 1, 2, 3, 5, or 6 post-activation.

[0522] FIGS. 7A-7B show IL-2 production by human PBMCs activated with the indicated antibodies. A similar experimental setup as described for FIGS. 6A-6B was used.

[0523] FIGS. 8A-8B show IL-6 production by human PBMCs activated with the indicated antibodies. A similar experimental setup as described for FIGS. 6A-6B was used.

[0524] FIGS. 9A-9B show TNF-alpha production by human PBMCs activated with the indicated antibodies. A similar experimental setup as described for FIGS. 6A-6B was used.

[0525] FIGS. 10A-10B show IL-lbeta production by human PBMCs activated with the indicated antibodies. A similar experimental setup as described for FIGS. 6A-6B was used.

[0526] FIGS. 11A-11B are graphs showing delayed kinetics of IFNγ secretion in human PMBCs activated by anti-TCR Vβ13.1 antibody A-H.1 when compared to PBMCs activated by anti-CD3e antibody OKT3. FIG. 11A shows IFNγ secretion data from 4 donors. FIG. 11B shows IFNγ secretion data from 4 additional donors. Data shown is representative of n=8 donors.

[0527] FIG. 12 depicts increased CD8+TSCM and Temra T cell subsets in human PBMCs activated by anti-TCR Vβ13.1 antibodies (A-H.1 or A-H.2) compared to PBMCs activated by anti-CD3e antibodies (OKT3 or SP34-2).

[0528] FIGS. 13A and 13B are schematics showing the alignments of affinity matured humanized antibody A-H sequences. FIG. 13A shows the alignment of affinity matured humanized Antibody A-H VL sequences (SEQ ID NOs: 3377-3389, respectively, in order of appearance). FIG. 13B shows the alignment of affinity matured humanized Antibody A-H VH sequences (SEQ ID NOs: 3390-3436, respectively, in order of appearance).

### DETAILED DESCRIPTION OF THE INVENTION

[0529] Previous studies have shown that even low “activating” doses of anti-CD3e mAb can cause long-term T cell dysfunction and exert immunosuppressive effects. In addition, anti-CD3e mAbs have been associated with side effects that result from massive T cell activation. The large number of activated T cells secrete substantial amounts of cytokines, the most important of which is Interferon gamma (IFNg; IFNγ). This excess amount of IFNγ in turn activates the macrophages which then overproduce proinflammatory cytokines such as IL-1, IL-6 and TNF-alpha, causing a “cytokine storm” known as the cytokine release syndrome (CRS). Thus, the need exists for developing antibodies that are capable of binding and activating only a subset of effector T cells, e.g., to reduce the CRS.

[0530] This disclosure provides, inter alfa, antibodies directed to the variable chain of the beta subunit of TCR (TCRβV) which bind and, e.g., activate a subset of T cells. The anti-TCRβV antibody molecules disclosed herein result in lesser or no production of cytokines associated with CRS, e.g., IL-6, IL-lbeta and TNF alpha; and enhanced and/or delayed production of IL-2 and IFNγ. In some embodiments, the anti-TCRβV antibodies disclosed herein result in expansion of a subset of memory effector T cells known as T_{EMRA}. Without wishing to be bound by theory, it is believed that in some embodiments, T_{EMRA} cells can promote cell lysis but not CRS. Accordingly, provided herein are methods of making said anti-TCRβV antibody molecules and uses thereof. Also disclosed herein are multispecific molecules, e.g., bispecific molecules comprising said anti-TCRβV antibody molecules. In some embodiments, compositions comprising anti-TCRβV antibody molecules of the present disclosure, can be used, e.g., to activate and redirect T cells to for treating an infectious disease. In some embodiments, compositions comprising anti-TCRβV antibody molecules as disclosed herein limit the harmful side-effects of CRS, e.g., CRS associated with anti-CD3e targeting.

[0531] In some embodiments, the anti-TCRβV antibody molecule does not bind to TCRβ V12, or binds to TCRβ V12 with an affinity and/or binding specificity that is less than (e.g., less than about 10%, 20%, 30%, 40%, 50%, 60%, 70%, 80%, 90% or about 2-, 5-, or 10-fold) the affinity and/or binding specificity of the murine mAb Antibody B or a humanized version thereof (e.g., humanized mAb Antibody B-H.1 to B-H.6) as described in U.S. Pat. No. 5,861,155.

[0532] In some embodiments, the anti-TCRβV antibody molecule binds to TCRβ V12 with an affinity and/or binding specificity that is greater than (e.g., greater than about 10%, 20%, 30%, 40%, 50%, 60%, 70%, 80%, 90% or about 2-, 5-, or 10-fold) the affinity and/or binding specificity of the murine mAb Antibody B or a humanized version thereof (e.g., humanized mAb Antibody B-H.1 to B-H.6) as described in U.S. Pat. No. 5,861,155.

[0533] In some embodiments, the anti-TCRβV antibody molecule binds to a TCRβV region other than TCRβ V12 (e.g., TCRβV region as described herein, e.g., TCRβ V6 subfamily (e.g., TCRβ V6-5*01) with an affinity and/or binding specificity that is greater than (e.g., greater than about 10%, 20%, 30%, 40%, 50%, 60%, 70%, 80%, 90% or about 2-, 5-, or 10-fold) the affinity and/or binding specificity of the murine mAb Antibody B or a humanized version thereof (e.g., humanized mAb Antibody B-H.1 to B-H.6) as described in U.S. Pat. No. 5,861,155.

[0534] In some embodiments, the anti-TCRβV antibody molecule does not comprise the CDRs of the murine mAb Antibody B.

[0535] In some embodiments, the anti-TCRβV antibody molecule does not bind to TCRβ V5-5*01 or TCRβ V5-1*01, or binds to TCRβ V5-5*01 or TCRβ V5-1*01 with an affinity and/or binding specificity that is less than (e.g., less than about 10%, 20%, 30%, 40%, 50%, 60%, 70%, 80%, 90% or about 2-, 5-, or 10-fold) the affinity and/or binding specificity of murine Antibody C or a humanized version thereof as described in U.S. Pat. No. 5,861,155.

[0536] In some embodiments, the anti-TCRβV antibody molecule binds to TCRβ V5-5*01 or TCRβ V5-1*01 with an affinity and/or binding specificity that is greater than (e.g., greater than about 10%, 20%, 30%, 40%, 50%, 60%, 70%, 80%, 90% or about 2-, 5-, or 10-fold) the affinity and/or binding specificity of murine Antibody C or a humanized version thereof as described in U.S. Pat. No. 5,861,155.

[0537] In some embodiments, the anti-TCRβV antibody molecule binds to a TCRβV region other than TCRβ V5-5*01 or TCRβ V5-1*01 (e.g., TCRβV region as described herein, e.g., TCRβ V6 subfamily (e.g., TCRβ V6-5*01) with an affinity and/or binding specificity that is greater than (e.g., greater than about 10%, 20%, 30%, 40%, 50%, 60%, 70%, 80%, 90% or about 2-, 5-, or 10-fold) the affinity and/or binding specificity of murine Antibody C or a humanized version thereof as described in U.S. Pat. No. 5,861,155.

[0538] In some embodiments, the anti-TCRβV antibody molecule does not comprise the CDRs of murine Antibody C.

[0539] Accordingly, provided herein are, inter alfa, anti-TCRβV antibody molecules, multispecific or multifunctional molecules (e.g., multispecific or multifunctional antibody molecules) that comprise anti-TCRβV antibody molecules, nucleic acids encoding the same, methods of producing the aforesaid molecules, pharmaceutical compositions comprising aforesaid molecules, and methods of treating a disease or disorder, e.g., an infectious disease, using the aforesaid molecules. The antibody molecules and pharmaceutical compositions disclosed herein can be used (alone or in combination with other agents or therapeutic modalities) to treat, prevent and/or diagnose disorders and conditions, e.g., an infectious disease, e.g., as described herein.

### Definitions

[0540] Unless defined otherwise, all technical and scientific terms used herein have the same meaning as commonly understood by one of ordinary skill in the art to which the invention pertains.

[0541] The term “a” and “an” refers to one or to more than one (i.e., to at least one) of the grammatical object of the article. By way of example, “an element” means one element or more than one element.

[0542] The term “about” when referring to a measurable value such as an amount, a temporal duration, and the like, is meant to encompass variations of ±20% or in some instances ±10%, or in some instances ±5%, or in some instances ±1%, or in some instances ±0.1% from the specified value, as such variations are appropriate to perform the disclosed methods.

[0543] The term “acquire” or “acquiring” as the terms are used herein, refer to obtaining possession of a physical entity (e.g., a sample, a polypeptide, a nucleic acid, or a sequence), or a value, e.g., a numerical value, by “directly acquiring” or “indirectly acquiring” the physical entity or value. “Directly acquiring” means performing a process (e.g., performing a synthetic or analytical method) to obtain the physical entity or value. “Indirectly acquiring” refers to receiving the physical entity or value from another party or source (e.g., a third party laboratory that directly acquired the physical entity or value). Directly acquiring a physical entity includes performing a process that includes a physical change in a physical substance, e.g., a starting material. Directly acquiring a value includes performing a process that includes a physical change in a sample or another substance, e.g., performing an analytical process which includes a physical change in a substance, e.g., a sample.

[0544] As used herein, the term “T cell receptor beta variable chain” or “TCRβV,” refers to an extracellular region of the T cell receptor beta chain which comprises the antigen recognition domain of the T cell receptor. The term TCRβV includes isoforms, mammalian, e.g., human TCRβV, species homologs of human and analogs comprising at least one common epitope with TCRβV. Human TCRβV comprises a gene family comprising subfamilies including, but not limited to: a TCRβ V6 subfamily, a TCRβ V10 subfamily, a TCRβ V12 subfamily, a TCRβ V5 subfamily, a TCRβ V7 subfamily, a TCRβ V11 subfamily, a TCRβ V14 subfamily, a TCRβ V16 subfamily, a TCRβ V18 subfamily, a TCRβ V9 subfamily, a TCRβ V13 subfamily, a TCRβ V4 subfamily, a TCRβ V3 subfamily, a TCRβ V2 subfamily, a TCRβ V15 subfamily, a TCRβ V30 subfamily, a TCRβ V19 subfamily, a TCRβ V27 subfamily, a TCRβ V28 subfamily, a TCRβ V24 subfamily, a TCRβ V20 subfamily, TCRβ V25 subfamily, or a TCRβ V29 subfamily. In some embodiments, the TCRβ V6 subfamily comprises: TCRβ V6-4*01, TCRβ V6-4*02, TCRβ V6-9*01, TCRβ V6-8*01, TCRβ V6-5*01, TCRβ V6-6*02, TCRβ V6-6*01, TCRβ V6-2*01, TCRβ V6-3*01 or TCRβ V6-1*01. In some embodiments, TCRβV comprises TCRβ V6-5*01. TCRβ V6-5*01 is also known as TRBV65; TCRBV6S5; TCRBV13S1, or TCRβ V13.1. The amino acid sequence of TCRβ V6-5*01, e.g., human TCRβ V6-5*01, is known in that art, e.g., as provided by IMGT ID L36092. In some embodiments, TCRβ V6-5*01 is encoded by the nucleic acid sequence of SEQ ID NO: 43, or a sequence having 85%, 90%, 95%, 99% or more identity thereof. In some embodiments, TCRβ V6-5*01 comprises the amino acid sequence of SEQ ID NO: 44, or a sequence having 85%, 90%, 95%, 99% or more identity thereof.

[0545] In some embodiments, the multifunctional molecule includes an immune cell engager. “An immune cell engager” refers to one or more binding specificities that bind and/or activate an immune cell, e.g., a cell involved in an immune response. In embodiments, the immune cell is chosen from a T cell, an NK cell, a B cell, a dendritic cell, and/or the macrophage cell. The immune cell engager can be an antibody molecule, a receptor molecule (e.g., a full length receptor, receptor fragment, or fusion thereof (e.g., a receptor-Fc fusion)), or a ligand molecule (e.g., a full length ligand, ligand fragment, or fusion thereof (e.g., a ligand-Fc fusion)) that binds to the immune cell antigen (e.g., the T cell, the NK cell antigen, the B cell antigen, the dendritic cell antigen, and/or the macrophage cell antigen). In embodiments, the immune cell engager specifically binds to the target immune cell, e.g., binds preferentially to the target immune cell. For example, when the immune cell engager is an antibody molecule, it binds to an immune cell antigen (e.g., a T cell antigen, an NK cell antigen, a B cell antigen, a dendritic cell antigen, and/or a macrophage cell antigen) with a dissociation constant of less than about 10 nM.

[0546] In some embodiments, the multifunctional molecule includes a cytokine molecule. As used herein, a “cytokine molecule” refers to full length, a fragment or a variant of a cytokine; a cytokine further comprising a receptor domain, e.g., a cytokine receptor dimerizing domain; or an agonist of a cytokine receptor, e.g., an antibody molecule (e.g., an agonistic antibody) to a cytokine receptor, that elicits at least one activity of a naturally-occurring cytokine. In some embodiments the cytokine molecule is chosen from interleukin-2 (IL-2), interleukin-7 (IL-7), interleukin-12 (IL-12), interleukin-15 (IL-15), interleukin-18 (IL-18), interleukin-21 (IL-21), or interferon gamma, or a fragment or variant thereof, or a combination of any of the aforesaid cytokines. The cytokine molecule can be a monomer or a dimer. In embodiments, the cytokine molecule can further include a cytokine receptor dimerizing domain. In other embodiments, the cytokine molecule is an agonist of a cytokine receptor, e.g., an antibody molecule (e.g., an agonistic antibody) to a cytokine receptor chosen from an IL-15Ra or IL-21R.

[0547] As used herein, the term “molecule” as used in, e.g., antibody molecule, cytokine molecule, receptor molecule, includes full-length, naturally-occurring molecules, as well as variants, e.g., functional variants (e.g., truncations, fragments, mutated (e.g., substantially similar sequences) or derivatized form thereof), so long as at least one function and/or activity of the unmodified (e.g., naturally-occurring) molecule remains.

[0548] In some embodiments, the multifunctional molecule includes a stromal modifying moiety. A “stromal modifying moiety,” as used herein refers to an agent, e.g., a protein (e.g., an enzyme), that is capable of altering, e.g., degrading a component of, the stroma. In embodiments, the component of the stroma is chosen from, e.g., an ECM component, e.g., a glycosaminoglycan, e.g., hyaluronan (also known as hyaluronic acid or HA), chondroitin sulfate, chondroitin, dermatan sulfate, heparin sulfate, heparin, entactin, tenascin, aggrecan and keratin sulfate; or an extracellular protein, e.g., collagen, laminin, elastin, fibrinogen, fibronectin, and vitronectin.

[0549] Certain terms are defined below.

[0550] As used herein, the articles “a” and “an” refer to one or more than one, e.g., to at least one, of the grammatical object of the article. The use of the words “a” or “an” when used in conjunction with the term “comprising” herein may mean “one,” but it is also consistent with the meaning of “one or more,” “at least one,” and “one or more than one.”

[0551] As used herein, “about” and “approximately” generally mean an acceptable degree of error for the quantity measured given the nature or precision of the measurements. Exemplary degrees of error are within 20 percent (%), typically, within 10%, and more typically, within 5% of a given range of values.

[0552] “Antibody molecule” as used herein refers to a protein, e.g., an immunoglobulin chain or fragment thereof, comprising at least one immunoglobulin variable domain sequence. An antibody molecule encompasses antibodies (e.g., full-length antibodies) and antibody fragments. In an embodiment, an antibody molecule comprises an antigen binding or functional fragment of a full-length antibody, or a full-length immunoglobulin chain. For example, a full-length antibody is an immunoglobulin (Ig) molecule (e.g., an IgG antibody) that is naturally occurring or formed by normal immunoglobulin gene fragment recombinatorial processes). In embodiments, an antibody molecule refers to an immunologically active, antigen-binding portion of an immunoglobulin molecule, such as an antibody fragment. An antibody fragment, e.g., functional fragment, is a portion of an antibody, e.g., Fab, Fab', F(ab′)₂, F(ab)₂, variable fragment (Fv), domain antibody (dAb), or single chain variable fragment (scFv). A functional antibody fragment binds to the same antigen as that recognized by the intact (e.g., full-length) antibody. The terms “antibody fragment” or “functional fragment” also include isolated fragments consisting of the variable regions, such as the “Fv” fragments consisting of the variable regions of the heavy and light chains or recombinant single chain polypeptide molecules in which light and heavy variable regions are connected by a peptide linker (“scFv proteins”). In some embodiments, an antibody fragment does not include portions of antibodies without antigen binding activity, such as Fc fragments or single amino acid residues. Exemplary antibody molecules include full length antibodies and antibody fragments, e.g., dAb (domain antibody), single chain, Fab, Fab', and F(ab′)₂ fragments, and single chain variable fragments (scFvs).

[0553] As used herein, an “immunoglobulin variable domain sequence” refers to an amino acid sequence which can form the structure of an immunoglobulin variable domain. For example, the sequence may include all or part of the amino acid sequence of a naturally-occurring variable domain. For example, the sequence may or may not include one, two, or more N- or C-terminal amino acids, or may include other alterations that are compatible with formation of the protein structure.

[0554] In embodiments, an antibody molecule is monospecific, e.g., it comprises binding specificity for a single epitope. In some embodiments, an antibody molecule is multispecific, e.g., it comprises a plurality of immunoglobulin variable domain sequences, where a first immunoglobulin variable domain sequence has binding specificity for a first epitope and a second immunoglobulin variable domain sequence has binding specificity for a second epitope. In some embodiments, an antibody molecule is a bispecific antibody molecule. “Bispecific antibody molecule” as used herein refers to an antibody molecule that has specificity for more than one (e.g., two, three, four, or more) epitope and/or antigen.

[0555] “Antigen” (Ag) as used herein refers to a molecule that can provoke an immune response, e.g., involving activation of certain immune cells and/or antibody generation. Any macromolecule, including almost all proteins or peptides, can be an antigen. Antigens can also be derived from genomic recombinant or DNA. For example, any DNA comprising a nucleotide sequence or a partial nucleotide sequence that encodes a protein capable of eliciting an immune response encodes an “antigen.” In embodiments, an antigen does not need to be encoded solely by a full length nucleotide sequence of a gene, nor does an antigen need to be encoded by a gene at all. In embodiments, an antigen can be synthesized or can be derived from a biological sample, e.g., a tissue sample, a cell, or a fluid with other biological components. As used, herein an “infectious disease antigen” includes any molecule present on, or associated with, an infectious disease or an agent that causes an infectious disease, e.g., a bacteria, virus, eukaryotic pathogen (e.g., fungus or parasite, e.g., malaria parasite), or portion thereof. Non-limiting examples of infectious disease antigens include proteins, polypeptides, peptides, nucleic acids, sugars, small molecules, lipids, or other molecules associated with, derived from, or comprised in an agent that causes an infectious disease (e.g., EBNA3 (e.g., 339-347), EBNA1 (e.g., 407-417), BZLF1 (e.g., 52-64), matrix protein (e.g., influenza virus matrix protein, e.g., 58-66), HIV Gag (e.g., HIV Gag p17, e.g., 77-85), HIV Env, HIV p24 capsid, SIV Tat (e.g., 28-35), SIV Gag (e.g., 181-189), or HCMV pp65 (e.g., 495-503)). As used, herein an “immune cell antigen” includes any molecule present on, or associated with, an immune cell that can provoke an immune response.

[0556] The “antigen-binding site,” or “binding portion” of an antibody molecule refers to the part of an antibody molecule, e.g., an immunoglobulin (Ig) molecule, that participates in antigen binding. In embodiments, the antigen binding site is formed by amino acid residues of the variable (V) regions of the heavy (H) and light (L) chains. Three highly divergent stretches within the variable regions of the heavy and light chains, referred to as hypervariable regions, are disposed between more conserved flanking stretches called “framework regions,” (FRs). FRs are amino acid sequences that are naturally found between, and adjacent to, hypervariable regions in immunoglobulins. In embodiments, in an antibody molecule, the three hypervariable regions of a light chain and the three hypervariable regions of a heavy chain are disposed relative to each other in three dimensional space to form an antigen-binding surface, which is complementary to the three-dimensional surface of a bound antigen. The three hypervariable regions of each of the heavy and light chains are referred to as “complementarity-determining regions,” or “CDRs.” The framework region and CDRs have been defined and described, e.g., in Kabat, E. A., et al. (1991) Sequences of Proteins of Immunological Interest, Fifth Edition, U.S. Department of Health and Human Services, NIH Publication No. 91-3242, and Chothia, C. et al. (1987) J. Mol. Biol. 196:901-917. Each variable chain (e.g., variable heavy chain and variable light chain) is typically made up of three CDRs and four FRs, arranged from amino-terminus to carboxy-terminus in the amino acid order: FR1, CDR1, FR2, CDR2, FR3, CDR3, and FR4.

[0557] “Infectious disease,” as used herein can encompass all types of diseases, disorders, or conditions associated with (e.g., caused by) an infectious pathogen. Non-limiting examples of infectious pathogens include bacteria, viruses, eukaryotic pathogens (e.g., fungal pathogens or parasites, e.g., malaria parasite), or portions thereof. Non-limiting examples of infectious diseases include Epstein-Barr virus (EBV), influenza, human immunodeficiency virus (HIV), simian immunodeficiency virus (SIV), tuberculosis, malaria, or human cytomegalovirus (HCMV).

[0558] As used herein, an “immune cell” refers to any of various cells that function in the immune system, e.g., to protect against agents of infection and foreign matter. In embodiments, this term includes leukocytes, e.g., neutrophils, eosinophils, basophils, lymphocytes, and monocytes. Innate leukocytes include phagocytes (e.g., macrophages, neutrophils, and dendritic cells), mast cells, eosinophils, basophils, and natural killer cells. Innate leukocytes identify and eliminate pathogens, either by attacking larger pathogens through contact or by engulfing and then killing microorganisms, and are mediators in the activation of an adaptive immune response. The cells of the adaptive immune system are special types of leukocytes, called lymphocytes. B cells and T cells are important types of lymphocytes and are derived from hematopoietic stem cells in the bone marrow. B cells are involved in the humoral immune response, whereas T cells are involved in cell-mediated immune response. The term “immune cell” includes immune effector cells.

[0559] “Immune effector cell,” as that term is used herein, refers to a cell that is involved in an immune response, e.g., in the promotion of an immune effector response. Examples of immune effector cells include, but are not limited to, T cells, e.g., alpha/beta T cells and gamma/delta T cells, B cells, natural killer (NK) cells, natural killer T (NK T) cells, and mast cells.

[0560] The term “effector function” or “effector response” refers to a specialized function of a cell. Effector function of a T cell, for example, may be cytolytic activity or helper activity including the secretion of cytokines.

[0561] The compositions and methods of the present invention encompass polypeptides and nucleic acids having the sequences specified, or sequences substantially identical or similar thereto, e.g., sequences at least 80%, 85%, 90%, 95% identical or higher to the sequence specified. In the context of an amino acid sequence, the term “substantially identical” is used herein to refer to a first amino acid that contains a sufficient or minimum number of amino acid residues that are i) identical to, or ii) conservative substitutions of aligned amino acid residues in a second amino acid sequence such that the first and second amino acid sequences can have a common structural domain and/or common functional activity. For example, amino acid sequences that contain a common structural domain having at least about 80%, 85%, 90%. 91%, 92%, 93%, 94%, 95%, 96%, 97%, 98% or 99% identity to a reference sequence, e.g., a sequence provided herein.

[0562] In the context of nucleotide sequence, the term “substantially identical” is used herein to refer to a first nucleic acid sequence that contains a sufficient or minimum number of nucleotides that are identical to aligned nucleotides in a second nucleic acid sequence such that the first and second nucleotide sequences encode a polypeptide having common functional activity, or encode a common structural polypeptide domain or a common functional polypeptide activity. For example, nucleotide sequences having at least about 80%, 85%, 90%, 91%, 92%, 93%, 94%, 95%, 96%, 97%, 98% or 99% identity to a reference sequence, e.g., a sequence provided herein.

[0563] The term “variant” refers to a polypeptide that has a substantially identical amino acid sequence to a reference amino acid sequence, or is encoded by a substantially identical nucleotide sequence. In some embodiments, the variant is a functional variant.

[0564] The term “functional variant” refers to a polypeptide that has a substantially identical amino acid sequence to a reference amino acid sequence, or is encoded by a substantially identical nucleotide sequence, and is capable of having one or more activities of the reference amino acid sequence.

[0565] Calculations of homology or sequence identity between sequences (the terms are used interchangeably herein) are performed as follows.

[0566] To determine the percent identity of two amino acid sequences, or of two nucleic acid sequences, the sequences are aligned for optimal comparison purposes (e.g., gaps can be introduced in one or both of a first and a second amino acid or nucleic acid sequence for optimal alignment and non-homologous sequences can be disregarded for comparison purposes). In a preferred embodiment, the length of a reference sequence aligned for comparison purposes is at least 30%, preferably at least 40%, more preferably at least 50%, 60%, and even more preferably at least 70%, 80%, 90%, 100% of the length of the reference sequence. The amino acid residues or nucleotides at corresponding amino acid positions or nucleotide positions are then compared. When a position in the first sequence is occupied by the same amino acid residue or nucleotide as the corresponding position in the second sequence, then the molecules are identical at that position (as used herein amino acid or nucleic acid “identity” is equivalent to amino acid or nucleic acid “homology”).

[0567] The percent identity between the two sequences is a function of the number of identical positions shared by the sequences, taking into account the number of gaps, and the length of each gap, which need to be introduced for optimal alignment of the two sequences.

[0568] The comparison of sequences and determination of percent identity between two sequences can be accomplished using a mathematical algorithm. In a preferred embodiment, the percent identity between two amino acid sequences is determined using the Needleman and Wunsch ((1970) J. Mol. Biol. 48:444-453) algorithm which has been incorporated into the GAP program in the GCG software package (available at http://www.gcg.com), using either a Blossum 62 matrix or a PAM250 matrix, and a gap weight of 16, 14, 12, 10, 8, 6, or 4 and a length weight of 1, 2, 3, 4, 5, or 6. In yet another preferred embodiment, the percent identity between two nucleotide sequences is determined using the GAP program in the GCG software package (available at http://www.gcg.com), using a NWSgapdna.CMP matrix and a gap weight of 40, 50, 60, 70, or 80 and a length weight of 1, 2, 3, 4, 5, or 6. A particularly preferred set of parameters (and the one that should be used unless otherwise specified) are a Blossum 62 scoring matrix with a gap penalty of 12, a gap extend penalty of 4, and a frameshift gap penalty of 5.

[0569] The percent identity between two amino acid or nucleotide sequences can be determined using the algorithm of E. Meyers and W. Miller ((1989) CABIOS, 4:11-17) which has been incorporated into the ALIGN program (version 2.0), using a PAM120 weight residue table, a gap length penalty of 12 and a gap penalty of 4.

[0570] The nucleic acid and protein sequences described herein can be used as a “query sequence” to perform a search against public databases to, for example, identify other family members or related sequences. Such searches can be performed using the NBLAST and) (BLAST programs (version 2.0) of Altschul, et al. (1990) J. Mol. Biol. 215:403-10. BLAST nucleotide searches can be performed with the NBLAST program, score =100, wordlength =12 to obtain nucleotide sequences homologous to a nucleic acid molecule of the invention. BLAST protein searches can be performed with the)(BLAST program, score =50, wordlength =3 to obtain amino acid sequences homologous to protein molecules of the invention. To obtain gapped alignments for comparison purposes, Gapped BLAST can be utilized as described in Altschul et al., (1997) Nucleic Acids Res. 25:3389-3402. When utilizing BLAST and Gapped BLAST programs, the default parameters of the respective programs (e.g.,)(BLAST and NBLAST) can be used.

[0571] It is understood that the molecules of the present invention may have additional conservative or non-essential amino acid substitutions, which do not have a substantial effect on their functions.

[0572] The term “amino acid” is intended to embrace all molecules, whether natural or synthetic, which include both an amino functionality and an acid functionality and capable of being included in a polymer of naturally-occurring amino acids. Exemplary amino acids include naturally-occurring amino acids; analogs, derivatives and congeners thereof; amino acid analogs having variant side chains; and all stereoisomers of any of any of the foregoing. As used herein the term “amino acid” includes both the D- or L- optical isomers and peptidomimetics.

[0573] A “conservative amino acid substitution” is one in which the amino acid residue is replaced with an amino acid residue having a similar side chain. Families of amino acid residues having similar side chains have been defined in the art. These families include amino acids with basic side chains (e.g., lysine, arginine, histidine), acidic side chains (e.g., aspartic acid, glutamic acid), uncharged polar side chains (e.g., glycine, asparagine, glutamine, serine, threonine, tyrosine, cysteine), nonpolar side chains (e.g., alanine, valine, leucine, isoleucine, proline, phenylalanine, methionine, tryptophan), beta-branched side chains (e.g., threonine, valine, isoleucine) and aromatic side chains (e.g., tyrosine, phenylalanine, tryptophan, histidine).

[0574] The terms “polypeptide”, “peptide” and “protein” (if single chain) are used interchangeably herein to refer to polymers of amino acids of any length. The polymer may be linear or branched, it may comprise modified amino acids, and it may be interrupted by non-amino acids. The terms also encompass an amino acid polymer that has been modified; for example, disulfide bond formation, glycosylation, lipidation, acetylation, phosphorylation, or any other manipulation, such as conjugation with a labeling component. The polypeptide can be isolated from natural sources, can be a produced by recombinant techniques from a eukaryotic or prokaryotic host, or can be a product of synthetic procedures.

[0575] The terms “nucleic acid,” “nucleic acid sequence,” “nucleotide sequence,” or “polynucleotide sequence,” and “polynucleotide” are used interchangeably. They refer to a polymeric form of nucleotides of any length, either deoxyribonucleotides or ribonucleotides, or analogs thereof. The polynucleotide may be either single-stranded or double-stranded, and if single-stranded may be the coding strand or non-coding (antisense) strand. A polynucleotide may comprise modified nucleotides, such as methylated nucleotides and nucleotide analogs. The sequence of nucleotides may be interrupted by non-nucleotide components. A polynucleotide may be further modified after polymerization, such as by conjugation with a labeling component. The nucleic acid may be a recombinant polynucleotide, or a polynucleotide of genomic, cDNA, semisynthetic, or synthetic origin which either does not occur in nature or is linked to another polynucleotide in a non-natural arrangement.

[0576] The term “isolated,” as used herein, refers to material that is removed from its original or native environment (e.g., the natural environment if it is naturally occurring). For example, a naturally-occurring polynucleotide or polypeptide present in a living animal is not isolated, but the same polynucleotide or polypeptide, separated by human intervention from some or all of the co-existing materials in the natural system, is isolated. Such polynucleotides could be part of a vector and/or such polynucleotides or polypeptides could be part of a composition, and still be isolated in that such vector or composition is not part of the environment in which it is found in nature.

[0577] Various aspects of the invention are described in further detail below. Additional definitions are set out throughout the specification.

### Human T Cell Receptor (TCR) Complex

[0578] T cell receptors (TCR) can be found on the surface of T cells. TCRs recognize antigens, e.g., peptides, presented on, e.g., bound to, major histocompatibility complex (MHC) molecules on the surface of cells, e.g., antigen-presenting cells. TCRs are heterodimeric molecules and can comprise an alpha chain, a beta chain, a gamma chain or a delta chain. TCRs comprising an alpha chain and a beta chain are also referred to as TCRαβ. The TCR beta chain consists of the following regions (also known as segments): variable (V), diversity (D), joining (J) and constant (C) (see Mayer G. and Nyland J. (2010) Chapter 10: Major Histocompatibility Complex and T-cell Receptors-Role in Immune Responses. In: Microbiology and Immunology on-line, University of South Carolina School of Medicine). The TCR alpha chain consists of V, J and C regions. The rearrangement of the T-cell receptor (TCR) through somatic recombination of V (variable), D (diversity), J (joining), and C (constant) regions is a defining event in the development and maturation of a T cell. TCR gene rearrangement takes place in the thymus.

[0579] TCRs can comprise a receptor complex, known as the TCR complex, which comprises a TCR heterodimer comprising of an alpha chain and a beta chain, and dimeric signaling molecules, e.g., CD3 co-receptors, e.g., CD3δ/ε, and/or CD3γ/ε.

TCR beta V (TCRβV)

[0580] Diversity in the immune system enables protection against a huge array of pathogens. Since the germline genome is limited in size, diversity is achieved not only by the process of V(D)J recombination but also by junctional (junctions between V-D and D-J segments) deletion of nucleotides and addition of pseudo-random, non-templated nucleotides. The TCR beta gene undergoes gene arrangement to generate diversity.

[0581] The TCR V beta repertoire varies between individuals and populations because of, e.g., 7 frequently occurring inactivating polymorphisms in functional gene segments and a large insertion/deletion-related polymorphism encompassing 2 V beta gene segments.

[0582] This disclosure provides, inter alia, antibody molecules and fragments thereof, that bind, e.g., specifically bind, to a human TCR beta V chain (TCRβV), e.g., a TCRβV gene family (also referred to as a group), e.g., a TCRβV subfamily (also referred to as a subgroup), e.g., as described herein. TCR beta V families and subfamilies are known in the art, e.g., as described in Yassai et al., (2009) Immunogenetics 61(7)pp:493-502; Wei S. and Concannon P. (1994) Human Immunology 41(3) pp: 201-206. The antibodies described herein can be recombinant antibodies, e.g., recombinant non-murine antibodies, e.g., recombinant human or humanized antibodies.

[0583] In an aspect, the disclosure provides an anti-TCRβV antibody molecule that binds to human TCRβV, e.g., a TCRβV family, e.g., gene family or a variant thereof. In some embodiments a TCRBV gene family comprises one or more subfamilies, e.g., as described herein, e.g., in FIG. 3, Table 1 or Table 2. In some embodiments, the TCRβV gene family comprises: a TCRβ V6 subfamily, a TCRβ V10 subfamily, a TCRβ V12 subfamily, a TCRβ V5 subfamily, a TCRβ V7 subfamily, a TCRβ V11 subfamily, a TCRβ V14 subfamily, a TCRβ V16 subfamily, a TCRβ V18 subfamily, a TCRβ V9 subfamily, a TCRβ V13 subfamily, a TCRβ V4 subfamily, a TCRβ V3 subfamily, a TCRβ V2 subfamily, a TCRβ V15 subfamily, a TCRβ V30 subfamily, a TCRβ V19 subfamily, a TCRβ V27 subfamily, a TCRβ V28 subfamily, a TCRβ V24 subfamily, a TCRβ V20 subfamily, TCRβ V25 subfamily, a TCRβ V29 subfamily, a TCRβ V1 subfamily, a TCRβ V17 subfamily, a TCRβ V21 subfamily, a TCRβ V23 subfamily, or a TCRβ V26 subfamily.

[0584] In some embodiments, TCRβ V6 subfamily is also known as TCRβ V13.1. In some embodiments, the TCRβ V6 subfamily comprises: TCRβ V6-4*01, TCRβ V6-4*02, TCRβ V6-9*01, TCRβ V6-8*01, TCRβ V6-5*01, TCRβ V6-6*02, TCRβ V6-6*01, TCRβ V6-2*01, TCRβ V6-3*01 or TCRβ V6-1*01, or a variant thereof. In some embodiments, TCRβ V6 comprises TCRβ V6-4*01, or a variant thereof. In some embodiments, TCRβ V6 comprises TCRβ V6-4*02, or a variant thereof. In some embodiments, TCRβ V6 comprises TCRβ V6-9*01, or a variant thereof. In some embodiments, TCRβ V6 comprises TCRβ V6-8*01, or a variant thereof. In some embodiments, TCRβ V6 comprises TCRβ V6-5*01, or a variant thereof. In some embodiments, TCRβ V6 comprises TCRβ V6-6*02, or a variant thereof. In some embodiments, TCRβ V6 comprises TCRβ V6-6*01, or a variant thereof. In some embodiments, TCRβ V6 comprises TCRβ V6-2*01, or a variant thereof. In some embodiments, TCRβ V6 comprises TCRβ V6-3*01, or a variant thereof. In some embodiments, TCRβ V6 comprises TCRβ V6-1*01, or a variant thereof.

[0585] In some embodiments, TCRβ V6 comprises TCRβ V6-5*01, or a variant thereof. In some embodiments, TCRβ V6, e.g., TCRβ V6-5*01, is recognized, e.g., bound, by SEQ ID NO: 1 and/or SEQ ID NO: 2. In some embodiments, TCRβ V6, e.g., TCRβ V6-5*01, is recognized, e.g., bound, by SEQ ID NO: 9 and/or SEQ ID NO: 10. In some embodiments, TCRβ V6 is recognized, e.g., bound, by SEQ ID NO: 9 and/or SEQ ID NO: 11.

[0586] In some embodiments, TCRβ V10 subfamily is also known as TCRβ V12. In some embodiments, the TCRβ V10 subfamily comprises: TCRβ V10-1*01, TCRβ V10-1*02, TCRβ V10-3*01 or TCRβ V10-2*01, or a variant thereof.

[0587] In some embodiments, TCRβ V12 subfamily is also known as TCRβ V8.1. In some embodiments, the TCRβ V12 subfamily comprises: TCRβ V12-4*01, TCRβ V12-3*01, or TCRβ V12-5*01, or a variant thereof. In some embodiments, TCRβ V12 is recognized, e.g., bound, by SEQ ID NO: 15 and/or SEQ ID NO: 16. In some embodiments, TCRβ V12 is recognized, e.g., bound, by any one of SEQ ID NOs 23-25, and/or any one of SEQ ID NO: 26-30:

[0588] In some embodiments, the TCRβ V5 subfamily is chosen from: TCRβ V5-5*01, TCRβ V5-6*01, TCRβ V5-4*01, TCRβ V5-8*01, TCRβ V5-1*01, or a variant thereof.

[0589] In some embodiments, the TCRβ V7 subfamily comprises TCRβ V7-7*01, TCRβ V7-6*01, TCRβ V7-8*02, TCRβ V7-4*01, TCRβ V7-2*02, TCRβ V7-2*03, TCRβ V7-2*01, TCRβ V7-3 *01, TCRβ V7-9*03, or TCRβ V7-9*01, or a variant thereof.

[0590] In some embodiments, the TCRβ V11 subfamily comprises: TCRβ V11-1*01, TCRβ V11-2*01 or TCRβ V11-3*01, or a variant thereof.

[0591] In some embodiments, the TCRβ V14 subfamily comprises TCRβ V14*01, or a variant thereof.

[0592] In some embodiments, the TCRβ V16 subfamily comprises TCRβ V16*01, or a variant thereof.

[0593] In some embodiments, the TCRβ V18 subfamily comprises TCRβ V18*01, or a variant thereof.

[0594] In some embodiments, the TCRβ V9 subfamily comprises TCRβ V9*01 or TCRβ V9*02, or a variant thereof.

[0595] In some embodiments, the TCRβ V13 subfamily comprises TCRβ V13*01, or a variant thereof.

[0596] In some embodiments, the TCRβ V4 subfamily comprises TCRβ V4-2*01, TCRβ V4-3*01, or TCRβ V4-1*01, or a variant thereof.

[0597] In some embodiments, the TCRβ V3 subfamily comprises TCRβ V3-1*01, or a variant thereof.

[0598] In some embodiments, the TCRβ V2 subfamily comprises TCRβ V2*01, or a variant thereof.

[0599] In some embodiments, the TCRβ V15 subfamily comprises TCRβ V15*01, or a variant thereof.

[0600] In some embodiments, the TCRβ V30 subfamily comprises TCRβ V30*01, or TCRβ V30*02, or a variant thereof.

[0601] In some embodiments, the TCRβ V19 subfamily comprises TCRβ V19*01, or TCRβ V19*02, or a variant thereof.

[0602] In some embodiments, the TCRβ V27 subfamily comprises TCRβ V27*01, or a variant thereof.

[0603] In some embodiments, the TCRβ V28 subfamily comprises TCRβ V28*01, or a variant thereof.

[0604] In some embodiments, the TCRβ V24 subfamily comprises TCRβ V24-1*01, or a variant thereof.

[0605] In some embodiments, the TCRβ V20 subfamily comprises TCRβ V20-1*01, or TCRβ V20-1*02, or a variant thereof.

[0606] In some embodiments, the TCRβ V25 subfamily comprises TCRβ V25-1*01, or a variant thereof.

[0607] In some embodiments, the TCRβ V29 subfamily comprises TCRβ V29-1*01, or a variant thereof,

TABLE 1
List of TCRPBV subfamilies and subfamily members

| Ref- | | |
|---|---|---|
| erence | | |
| in | | |
| FIG. | | |
| 3 | Subfamily | Subfamily members |
| A | TCRβ V6 | TCRβ V6-4*01, TCRβ V6-4*02, TCRβ V6-9*01, |
| | Also referred | TCRβ V6-8*01, TCRβ V6-5*01, TCRβ V6-6*02, |
| | to as: | |
| | TCR VB 13.1 | TCRβ V6-6*01, TCRβ V6-2*01, |
| | | TCRβ V6-3*01 or |
| | | TCRβ V6-1*01. |
| B | TCRβ V10 | TCRβ V10-1*01, TCRβ V10-1*02, |
| | Also referred | TCRβ V10-3*01 or |
| | to as: | TCRβ V10-2*01 |
| | TCRβ V12 | |
| C | TCRβ V12 | TCRβ V12-4*01, TCRβ V12-3*01, or |
| | Also referred | TCRβ V12-5*01 |
| | to as: | |
| | TCRβ V8.1 | |
| D | TCRβ V5 | TCRβ V5-5*01, TCRβ V5-6*01, TCRβ V5-4*01, |
| | | TCRβ V5-8*01, TCRβ V5-1*01 |
| E | TCRβ V7 | TCRβ V7-7*01, TCRβ V7-6*01, TCRβ V7 -8*02, |
| | | TCRβ V7 -4*01, TCRβ V7-2*02, TCRβ V7-2*03, |
| | | TCRβ V7-2*01, TCRβ V7-3*01, TCRβ V7-9*03, |
| | | or |
| | | TCRβ V7-9*01 |
| F | TCRβ V11 | TCRβ V11-1*01, TCRβ V11-2*01 or |
| | | TCRβ V11-3*01 |
| G | TCRβ V14 | TCRβ V14*01 |
| H | TCRβ V16 | TCRβ V16*01 |
| I | TCRβ V18 | TCRβ V18*01 |
| J | TCRβ V9 | TCRβ V9*01 or TCRβ V9*02 |
| K | TCRβ V13 | TCRβ V13*01 |
| L | TCRβ V4 | TCRβ V4-2*01, TCRβ V4-3*01, or |
| | | TCRβ V4-1*01 |
| M | TCRβ V3 | TCRβ V3-1*01 |
| N | TCRβ V2 | TCRβ V2*01 |
| 0 | TCRβ V15 | TCRβ V15*01 |
| P | TCRβ V30 | TCRβ V30*01, or TCRβ V30*02 |
| Q | TCRβ V19 | TCRβ V19*01, or TCRβ V19*02 |
| R | TCRβ V27 | TCRβ V27*01. |
| S | TCRβ V28 | TCRβ V28*01. |
| T | TCRβ V24 | TCRβ V24-1*01 |
| U | TCRβ V20 | TCRβ V20-1*01, or TCRβ V20-1*02 |
| V | TCRβ V25 | TCRβ V25-1*01 |
| W | TCRβ V29 | TCRβ V29-1*01 |

TABLE 2
Additional TCRPV subfamilies

Subfamily
TCRβ V1
TCRβ V17
TCRβ V21
TCRβ V23
TCRβ V26

### Anti-TCRβV Antibodies

[0608] Disclosed herein, is the discovery of a novel class of antibodies, i.e. anti-TCRβV antibody molecules disclosed herein, which despite having low sequence similarity (e.g., low sequence identity among the different antibody molecules that recognize different TCRβV subfamilies), recognize a structurally conserved region, e.g., domain, on the TCRβV protein and have a similar function (e.g., a similar cytokine profile). Thus, the anti-TCRβV antibody molecules disclosed herein share a structure-function relationship.

[0609] In some embodiments, the anti-TCRβV antibody molecules disclosed herein do not recognize, e.g., bind to, an interface of a TCRβV:TCRalpha complex.

[0610] In some embodiments, the anti-TCRβV antibody molecules disclosed herein do not recognize, e.g., bind to, a constant region of a TCRβV protein. An exemplary antibody that binds to a constant region of a TCRBV region is JOVI.1 as described in Viney et al., (Hybridoma. 1992 Dec; 11(6):701-13).

[0611] In some embodiments, the anti-TCRβV antibody molecules disclosed herein do not recognize, e.g., bind to, one or more (e.g., all) of a complementarity determining region (e.g., CDR1, CDR2 and/or CDR3) of a TCRβV protein.

[0612] In some embodiments, the anti-TCRβV antibody molecules disclosed herein binds (e.g., specifically binds) to a TCRβV region. In some embodiments, binding of anti-TCRβV antibody molecules disclosed herein results in a cytokine profile that differs from a cytokine profile of a T cell engager that binds to a receptor or molecule other than a TCRβV region (“a non-TCRβV-binding T cell engager”). In some embodiments, the non-TCRβV-binding T cell engager comprises an antibody that binds to a CD3 molecule (e.g., CD3 epsilon (CD3e) molecule); or a TCR alpha (TCRα) molecule. In some embodiments, the non-TCRβV-binding T cell engager is an OKT3 antibody or an SP34-2 antibody.

[0613] In an aspect, the disclosure provides an anti-TCRβV antibody molecule that binds to human TCRβV, e.g., a TCRβV gene family, e.g., one or more of a TCRβV subfamily, e.g., as described herein, e.g., in FIG. 3, Table 1, or Table 2. In some embodiments, the anti-TCRβV antibody molecule binds to one or more TCRβV subfamilies chosen from: a TCRβ V6 subfamily, a TCRβ V10 subfamily, a TCRβ V12 subfamily, a TCRβ V5 subfamily, a TCRβ V7 subfamily, a TCRβ V11 subfamily, a TCRβ V14 subfamily, a TCRβ V16 subfamily, a TCRβ V18 subfamily, a TCRβ V9 subfamily, a TCRβ V13 subfamily, a TCRβ V4 subfamily, a TCRβ V3 subfamily, a TCRβ V2 subfamily, a TCRβ V15 subfamily, a TCRβ V30 subfamily, a TCRβ V19 subfamily, a TCRβ V27 subfamily, a TCRβ V28 subfamily, a TCRβ V24 subfamily, a TCRβ V20 subfamily, TCRβ V25 subfamily, a TCRβ V29 subfamily, a TCRβ V1 subfamily, a TCRβ V17 subfamily, a TCRβ V21 subfamily, a TCRβ V23 subfamily, or a TCRβ V26 subfamily, or a variant thereof.

[0614] In some embodiments, the anti-TCRβV antibody molecule binds to a TCRβ V6 subfamily comprising: TCRβ V6-4*01, TCRβ V6-4*02, TCRβ V6-9*01, TCRβ V6-8*01, TCRβ V6-5*01, TCRβ V6-6*02, TCRβ V6-6*01, TCRβ V6-2*01, TCRβ V6-3*01 or TCRβ V6-1*01, or a variant thereof. In some embodiments the TCRβ V6 subfamily comprises TCRβ V6-5*01, or a variant thereof. In some embodiments, TCRβ V6 comprises TCRβ V6-4*01, or a variant thereof. In some embodiments, TCRβ V6 comprises TCRβ V6-4*02, or a variant thereof. In some embodiments, TCRβ V6 comprises TCRβ V6-9*01, or a variant thereof. In some embodiments, TCRβ V6 comprises TCRβ V6-8*01, or a variant thereof. In some embodiments, TCRβ V6 comprises TCRβ V6-5*01, or a variant thereof. In some embodiments, TCRβ V6 comprises TCRβ V6-6*02, or a variant thereof. In some embodiments, TCRβ V6 comprises TCRβ V6-6*01, or a variant thereof. In some embodiments, TCRβ V6 comprises TCRβ V6-2*01, or a variant thereof. In some embodiments, TCRβ V6 comprises TCRβ V6-3 *01, or a variant thereof. In some embodiments, TCRβ V6 comprises TCRβ V6-1*01, or a variant thereof.

[0615] In some embodiments, the anti-TCRβV antibody molecule binds to a TCRβ V10 subfamily comprising: TCRβ V10-1*01, TCRβ V10-1*02, TCRβ V10-3*01 or TCRβ V10-2*01, or a variant thereof.

[0616] In some embodiments, the anti-TCRβV antibody molecule binds to a TCRβ V12 subfamily comprising: TCRβ V12-4*01, TCRβ V12-3*01 or TCRβ V12-5*01, or a variant thereof.

[0617] In some embodiments, the anti-TCRβV antibody molecule binds to a TCRβ V5 subfamily comprising: TCRβ V5-5*01, TCRβ V5-6*01, TCRβ V5-4*01, TCRβ V5-8*01, TCRβ V5-1*01, or a variant thereof.

[0618] In some embodiments, the anti-TCRβV antibody molecule does not bind to TCRβ V12, or binds to TCRβ V12 with an affinity and/or binding specificity that is less than (e.g., less than about 10%, 20%, 30%, 40%, 50%, 60%, 70%, 80%, 90% or about 2-, 5-, or 10-fold) the affinity and/or binding specificity of the 16G8 murine antibody or a humanized version thereof as described in U.S. Pat. No. 5,861,155.

[0619] In some embodiments, the anti-TCRβV antibody molecule binds to TCRβ V12 with an affinity and/or binding specificity that is greater than (e.g., greater than about 10%, 20%, 30%, 40%, 50%, 60%, 70%, 80%, 90% or about 2-, 5-, or 10-fold) the affinity and/or binding specificity of the 16G8 murine antibody or a humanized version thereof as described in U.S. Pat. No. 5,861,155.

[0620] In some embodiments, the anti-TCRβV antibody molecule binds to a TCRβV region other than TCRβ V12 (e.g., TCRβV region as described herein, e.g., TCRβ V6 subfamily (e.g., TCRβ V6-5*01) with an affinity and/or binding specificity that is greater than (e.g., greater than about 10%, 20%, 30%, 40%, 50%, 60%, 70%, 80%, 90% or about 2-, 5-, or 10-fold) the affinity and/or binding specificity of the 16G8 murine antibody or a humanized version thereof as described in U.S. Pat. No. 5,861,155.

[0621] In some embodiments, the anti-TCRβV antibody molecule does not bind to TCRβ V5-5*01 or TCRβ V5-1*01, or binds to TCRβ V5-5*01 or TCRβ V5-1*01 with an affinity and/or binding specificity that is less than (e.g., less than about 10%, 20%, 30%, 40%, 50%, 60%, 70%, 80%, 90% or about 2-, 5-, or 10-fold) the affinity and/or binding specificity of murine Antibody C or a humanized version thereof as described in U.S. Pat. No. 5,861,155.

[0622] In some embodiments, the anti-TCRβV antibody molecule binds to TCRβ V5-5*01 or TCRβ V5-1*Olwith an affinity and/or binding specificity that is greater than (e.g., greater than about 10%, 20%, 30%, 40%, 50%, 60%, 70%, 80%, 90% or about 2-, 5-, or 10-fold) the affinity and/or binding specificity of murine Antibody C or a humanized version thereof as described in U.S. Pat. No. 5,861,155.

[0623] In some embodiments, the anti-TCRβV antibody molecule binds to a TCRβV region other than TCRβ V5-5*01 or TCRβ V5-1*01 (e.g., TCRβV region as described herein, e.g., TCRβ V6 subfamily (e.g., TCRβ V6-5*01) with an affinity and/or binding specificity that is greater than (e.g., greater than about 10%, 20%, 30%, 40%, 50%, 60%, 70%, 80%, 90% or about 2-, 5-, or 10-fold) the affinity and/or binding specificity of murine Antibody C or a humanized version thereof as described in U.S. Pat. No. 5,861,155.

### Anti-TCRI3 V6 Antibodies

[0624] Accordingly, in one aspect, the disclosure provides an anti-TCRβV antibody molecule that binds to human TCRβ V6, e.g., a TCRβ V6 subfamily comprising: TCRβ V6-4*01, TCRβ V6-4*02, TCRβ V6-9*01, TCRβ V6-8*01, TCRβ V6-5*01, TCRβ V6-6*02, TCRβ V6-6*01, TCRβ V6-2*01, TCRβ V6-3*01 or TCRβ V6-1*01. In some embodiments the TCRβ V6 subfamily comprises TCRβ V6-5*01 or a variant thereof. In some embodiments, TCRβ V6 comprises TCRβ V6-4*01, or a variant thereof. In some embodiments, TCRβ V6 comprises TCRβ V6-4*02, or a variant thereof. In some embodiments, TCRβ V6 comprises TCRβ V6-9*01, or a variant thereof. In some embodiments, TCRβ V6 comprises TCRβ V6-8*01, or a variant thereof. In some embodiments, TCRβ V6 comprises TCRβ V6-5*01, or a variant thereof. In some embodiments, TCRβ V6 comprises TCRβ V6-6*02, or a variant thereof. In some embodiments, TCRβ V6 comprises TCRβ V6-6*01, or a variant thereof. In some embodiments, TCRβ V6 comprises TCRβ V6-2*01, or a variant thereof. In some embodiments, TCRβ V6 comprises TCRβ V6-3 *01, or a variant thereof. In some embodiments, TCRβ V6 comprises TCRβ V6-1*01, or a variant thereof.

[0625] In some embodiments, TCRβ V6-5*01 is encoded by the nucleic acid sequence of SEQ ID NO: 43, or a sequence having 85%, 90%, 95%, 99% or more identity thereof.

SEQ ID NO: 43
ATGAGCATCGGCCTCCTGTGCTGTGCAGCCTTGTCTCTCCTGTGGGCAG
GTCCAGTGAATGCTGGTGTCACTCAGACCCCAAAATTCCAGGTCCTGAA
GACAGGACAGAGCATGACACTGCAGTGTGCCCAGGATATGAACCATGAA
TACATGTCCTGGTATCGACAAGACCCAGGCATGGGGCTGAGGCTGATTC
ATTACTCAGTTGGTGCTGGTATCACTGACCAAGGAGAAGTCCCCAATGG
CTACAATGTCTCCAGATCAACCACAGAGGATTTCCCGCTCAGGCTGCTG
TCGGCTGCTCCCTCCCAGACATCTGTGTACTTCTGTGCCAGCAGTTACT
C

[0626] In some embodiments, TCRβ V6-5*01 comprises the amino acid sequence of SEQ ID NO: 44, or an amino acid sequence having 85%, 90%, 95%, 99% or more identity thereof.

SEQ ID NO: 44
MSIGLLCCAALSLLWAGPVNAGVTQTPKFQVLKTGQSMTLQCAQDMNHE
YMSWYRQDPGMGLRLIHYSVGAGITDQGEVPNGYNVSRSTTEDFPLRLL
SAAPSQTSVYFCASSY

[0627] In some embodiments, the anti-TCRβV antibody molecule, e.g., anti-TCRβV6 (e.g., anti-TCRβV6-5*01) antibody molecule, is a non-murine antibody molecule, e.g., a human or humanized antibody molecule. In some embodiments, the anti-TCRβV antibody molecule, e.g., anti-TCRβV6 (e.g., anti-TCRβV6-5*01) antibody molecule is a human antibody molecule. In some embodiments, the anti-TCRβV antibody molecule, e.g., anti-TCRβV6 (e.g., anti-TCRβV6-5*01) antibody molecule is a humanized antibody molecule.

[0628] In some embodiments, the anti-TCRβV antibody molecule, e.g., anti-TCRβV6 (e.g., anti-TCRβV6-5*01) antibody molecule, is isolated or recombinant.

[0629] In some embodiments, the anti-TCRβV antibody molecule, e.g., anti-TCRβV6 (e.g., anti-TCRβV6-5*01) antibody molecule, comprises at least one antigen-binding region, e.g., a variable region or an antigen-binding fragment thereof, from an antibody described herein, e.g., an antibody chosen from any one of A-H.1 to A-H.68, e.g., A-H.1, A-H.2 or A-H.68, or an antibody described in Table 3, or encoded by a nucleotide sequence in Table 3, or a sequence substantially identical (e.g., at least 80%, 85%, 90%, 92%, 95%, 97%, 98%, 99% or higher identical) to any of the aforesaid sequences.

[0630] In some embodiments, the anti-TCRβV antibody molecule, e.g., anti-TCRβV6 (e.g., anti-TCRβV6-5*01) antibody molecule, comprises at least one, two, three or four variable regions from an antibody described herein, e.g., an antibody chosen from any one of A-H.1 to A-H.68, e.g., A-H.1, A-H.2 or A-H.68, or an antibody described in Table 3, or encoded by a nucleotide sequence in Table 3, or a sequence substantially identical (e.g., at least 80%, 85%, 90%, 92%, 95%, 97%, 98%, 99% or higher identical) to any of the aforesaid sequences.

[0631] In some embodiments, the anti-TCRβV antibody molecule, e.g., anti-TCRβV6 (e.g., anti-TCRβV6-5*01) antibody molecule, comprises at least one or two heavy chain variable regions from an antibody described herein, e.g., an antibody chosen from any one of A-H.1 to A-H.68, e.g., A-H.1, A-H.2 or A-H.68, or an antibody molecule described in Table 3, or encoded by a nucleotide sequence in Table 3, or a sequence substantially identical (e.g., at least 80%, 85%, 90%, 92%, 95%, 97%, 98%, 99% or higher identical) to any of the aforesaid sequences.

[0632] In some embodiments, the anti-TCRβV antibody molecule comprises a heavy chain variable region (VH) having a consensus sequence of SEQ ID NO: 231 or 3290.

[0633] In some embodiments, the anti-TCRβV antibody molecule, e.g., anti-TCRβV6 (e.g., anti-TCRβV6-5*01) antibody molecule, comprises at least one or two light chain variable regions from an antibody described herein, e.g., an antibody chosen from any one of A-H.1 to A-H.68, e.g., A-H.1, A-H.2 or A-H.68, or an antibody described in Table 3, or encoded by a nucleotide sequence in Table 3, or a sequence substantially identical (e.g., at least 80%, 85%, 90%, 92%, 95%, 97%, 98%, 99% or higher identical) to any of the aforesaid sequences.

[0634] In some embodiments, the anti-TCRβV antibody molecule comprises a light chain variable region (VL) having a consensus sequence of SEQ ID NO: 230 or 3289.

[0635] In some embodiments, the anti-TCRβV antibody molecule, e.g., anti-TCRβV6 (e.g., anti-TCRβ V6-5*01) antibody molecule, comprises a heavy chain constant region for an IgG4, e.g., a human IgG4. In still another embodiment, the anti-TCRβV antibody molecule, e.g., anti-TCRβ V6 (e.g., anti-TCRβ V6-5*01) antibody molecule includes a heavy chain constant region for an IgG1, e.g., a human IgG1. In one embodiment, the heavy chain constant region comprises an amino sequence set forth in Table 5, or a sequence substantially identical (e.g., at least 80%, 85%, 90%, 92%, 95%, 97%, 98%, 99% or higher identical) thereto.

[0636] In some embodiments, the anti-TCRβV antibody molecule, e.g., anti-TCRβV6 (e.g., anti-TCRβ V6-5*01) antibody molecule, includes a kappa light chain constant region, e.g., a human kappa light chain constant region. In one embodiment, the light chain constant region comprises an amino sequence set forth in Table 5, or a sequence substantially identical (e.g., at least 80%, 85%, 90%, 92%, 95%, 97%, 98%, 99% or higher identical) thereto.

[0637] In some embodiments, the anti-TCRβV antibody molecule, e.g., anti-TCRβV6 (e.g., anti-TCRβ V6-5*01) antibody molecule, includes at least one, two, or three complementarity determining regions (CDRs) from a heavy chain variable region (VH) of an antibody described herein, e.g., an antibody chosen from any one of A-H.1 to A-H.68, e.g., A-H.1, A-H.2 or A-H.68, or an antibody described in Table 3, or encoded by a nucleotide sequence in Table 3, or a sequence substantially identical (e.g., at least 80%, 85%, 90%, 92%, 95%, 97%, 98%, 99% or higher identical) to any of the aforesaid sequences.

[0638] In some embodiments, the anti-TCRβV antibody molecule, e.g., anti-TCRβV6 (e.g., anti-TCRβ V6-5*01) antibody molecule, includes at least one, two, or three CDRs (or collectively all of the CDRs) from a heavy chain variable region comprising an amino acid sequence shown in Table 3, or encoded by a nucleotide sequence shown in Table 3. In one embodiment, one or more of the CDRs (or collectively all of the CDRs) have one, two, three, four, five, six or more changes, e.g., amino acid substitutions or deletions, relative to the amino acid sequence shown in Table 3, or encoded by a nucleotide sequence shown in Table 3.

[0639] In some embodiments, the anti-TCRβV antibody molecule, e.g., anti-TCRβV6 (e.g., anti-TCRβ V6-5*01) antibody molecule, includes at least one, two, or three complementarity determining regions (CDRs) from a light chain variable region of an antibody described herein, e.g., an antibody chosen from any one of A-H.1 to A-H.68, e.g., A-H.1, A-H.2 or A-H.68, or an antibody described in Table 3, or encoded by a nucleotide sequence in Table 3, or a sequence substantially identical (e.g., at least 80%, 85%, 90%, 92%, 95%, 97%, 98%, 99% or higher identical) to any of the aforesaid sequences.

[0640] In some embodiments, the anti-TCRβV antibody molecule, e.g., anti-TCRβV6 (e.g., anti-TCRβ V6-5*01) antibody molecule, includes at least one, two, or three CDRs (or collectively all of the CDRs) from a light chain variable region comprising an amino acid sequence shown in Table 3, or encoded by a nucleotide sequence shown in Table 3. In one embodiment, one or more of the CDRs (or collectively all of the CDRs) have one, two, three, four, five, six or more changes, e.g., amino acid substitutions or deletions, relative to the amino acid sequence shown in Table 3, or encoded by a nucleotide sequence shown in Table 3.

[0641] In some embodiments, the anti-TCRβV antibody molecule, e.g., anti-TCRβV6 (e.g., anti-TCRβ V6-5*01) antibody molecule, includes at least one, two, three, four, five or six CDRs (or collectively all of the CDRs) from a heavy and light chain variable region comprising an amino acid sequence shown in Table 3, or encoded by a nucleotide sequence shown in Table 3. In one embodiment, one or more of the CDRs (or collectively all of the CDRs) have one, two, three, four, five, six or more changes, e.g., amino acid substitutions or deletions, relative to the amino acid sequence shown in Table 3, or encoded by a nucleotide sequence shown in Table 3.

[0642] In some embodiments, the anti-TCRβV antibody molecule, e.g., anti-TCRβV6 (e.g., anti-TCRβ V6-5*01) antibody molecule, molecule includes all six CDRs from an antibody described herein, e.g., an antibody chosen from any one of A-H.1 to A-H.68, e.g., A-H.1, A-H.2 or A-H.68, or an antibody described in Table 3, or encoded by a nucleotide sequence in Table 3, or closely related CDRs, e.g., CDRs which are identical or which have at least one amino acid alteration, but not more than two, three or four alterations (e.g., substitutions, deletions, or insertions, e.g., conservative substitutions). In some embodiments, the anti-TCRβV antibody molecule, e.g., anti-TCRβV6 (e.g., anti-TCRβ V6-5*01) antibody molecule, may include any CDR described herein.

[0643] In some embodiments, the anti-TCRβV antibody molecule, e.g., anti-TCRβV6 (e.g., anti-TCRβ V6-5*01) antibody molecule includes at least one, two, or three CDRs according to Kabat et al. (e.g., at least one, two, or three CDRs according to the Kabat definition as set out in Table 3) from a heavy chain variable region of an antibody described herein, e.g., an antibody chosen from any one of A-H.1 to A-H.68, e.g., A-H.1, A-H.2 or A-H.68, or an antibody described in Table 3, or a sequence substantially identical (e.g., at least 80%, 85%, 90%, 92%, 95%, 97%, 98%, 99% or higher identical) to any of the aforesaid sequences; or which have at least one amino acid alteration, but not more than two, three or four alterations (e.g., substitutions, deletions, or insertions, e.g., conservative substitutions) relative to one, two, or three CDRs according to Kabat et al. shown in Table 3.

[0644] In some embodiments, the anti-TCRβV antibody molecule, e.g., anti-TCRβV6 (e.g., anti-TCRβ V6-5*01) antibody molecule includes at least one, two, or three CDRs according to Kabat et al. (e.g., at least one, two, or three CDRs according to the Kabat definition as set out in Table 3) from a light chain variable region of an antibody described herein, e.g., an antibody chosen from any one of A-H.1 to A-H.68, e.g., A-H.1, A-H.2 or A-H.68, or an antibody described in Table 3, or a sequence substantially identical (e.g., at least 80%, 85%, 90%, 92%, 95%, 97%, 98%, 99% or higher identical) to any of the aforesaid sequences; or which have at least one amino acid alteration, but not more than two, three or four alterations (e.g., substitutions, deletions, or insertions, e.g., conservative substitutions) relative to one, two, or three CDRs according to Kabat et al. shown in Table 3.

[0645] In some embodiments, the anti-TCRβV antibody molecule, e.g., anti-TCRβV6 (e.g., anti-TCRβ V6-5*01) antibody molecule, includes at least one, two, three, four, five, or six CDRs according to Kabat et al. (e.g., at least one, two, three, four, five, or six CDRs according to the Kabat definition as set out in Table 3) from the heavy and light chain variable regions of an antibody described herein, e.g., an antibody chosen from any one of A-H.1 to A-H.68, e.g., A-H.1, A-H.2 or A-H.68, or an antibody described in Table 3, or encoded by a nucleotide sequence in Table 3; or a sequence substantially identical (e.g., at least 80%, 85%, 90%, 92%, 95%, 97%, 98%, 99% or higher identical) to any of the aforesaid sequences; or which have at least one amino acid alteration, but not more than two, three or four alterations (e.g., substitutions, deletions, or insertions, e.g., conservative substitutions) relative to one, two, three, four, five, or six CDRs according to Kabat et al. shown in Table 3.

[0646] In some embodiments, the anti-TCRβV antibody molecule, e.g., anti-TCRβV6 (e.g., anti-TCRβ V6-5*01) antibody molecule, includes all six CDRs according to Kabat et al. (e.g., all six CDRs according to the Kabat definition as set out in Table 3) from the heavy and light chain variable regions of an antibody described herein, e.g., an antibody chosen from any one of A-H.1 to A-H.68, e.g., A-H.1, A-H.2 or A-H.68, or an antibody described in Table 3, or encoded by a nucleotide sequence in Table 3; or a sequence substantially identical (e.g., at least 80%, 85%, 90%, 92%, 95%, 97%, 98%, 99% or higher identical) to any of the aforesaid sequences; or which have at least one amino acid alteration, but not more than two, three or four alterations (e.g., substitutions, deletions, or insertions, e.g., conservative substitutions) relative to all six CDRs according to Kabat et al. shown in Table 3. In one embodiment, the anti-TCRβV antibody molecule, e.g., anti-TCRβV6 (e.g., anti-TCRβ V6-5*01) antibody molecule, may include any CDR described herein.

[0647] In some embodiments, the anti-TCRβV antibody molecule, e.g., anti-TCRβV6 (e.g., anti-TCRβ V6-5*01) antibody molecule, includes at least one, two, or three hypervariable loops that have the same canonical structures as the corresponding hypervariable loop of an antibody described herein, e.g., an antibody chosen from chosen from any one of A-H.1 to A-H.68, e.g., A-H.1, A-H.2 or A-H.68, e.g., the same canonical structures as at least loop 1 and/or loop 2 of the heavy and/or light chain variable domains of an antibody described herein. See, e.g., Chothia et al., (1992) J. Mol. Biol. 227:799-817; Tomlinson et al., (1992) J. Mol. Biol. 227:776-798 for descriptions of hypervariable loop canonical structures. These structures can be determined by inspection of the tables described in these references.

[0648] In some embodiments, the anti-TCRβV antibody molecule, e.g., anti-TCRβV6 (e.g., anti-TCRβ V6-5*01) antibody molecule includes at least one, two, or three CDRs according to Chothia et al. (e.g., at least one, two, or three CDRs according to the Chothia definition as set out in Table 3) from a heavy chain variable region of an antibody described herein, e.g., an antibody chosen from any one of A-H.1 to A-H.68, e.g., A-H.1, A-H.2 or A-H.68, or as described in Table 3, or a sequence substantially identical (e.g., at least 80%, 85%, 90%, 92%, 95%, 97%, 98%, 99% or higher identical) to any of the aforesaid sequences; or which have at least one amino acid alteration, but not more than two, three or four alterations (e.g., substitutions, deletions, or insertions, e.g., conservative substitutions) relative to one, two, or three CDRs according to Chothia et al. shown in Table 3.

[0649] In some embodiments, the anti-TCRβV antibody molecule, e.g., anti-TCRβV6 (e.g., anti-TCRβ V6-5*01) antibody molecule includes at least one, two, or three CDRs according to Chothia et al. (e.g., at least one, two, or three CDRs according to the Chothia definition as set out in Table 3) from a light chain variable region of an antibody described herein, e.g., an antibody chosen from any one of A-H.1 to A-H.68, e.g., A-H.1, A-H.2 or A-H.68, or an antibody described in Table 3, or a sequence substantially identical (e.g., at least 80%, 85%, 90%, 92%, 95%, 97%, 98%, 99% or higher identical) to any of the aforesaid sequences; or which have at least one amino acid alteration, but not more than two, three or four alterations (e.g., substitutions, deletions, or insertions, e.g., conservative substitutions) relative to one, two, or three CDRs according to Chothia et al. shown in Table 3.

[0650] In some embodiments, the anti-TCRβV antibody molecule, e.g., anti-TCRβV6 (e.g., anti-TCRβ V6-5*01) antibody molecule, includes at least one, two, three, four, five, or six CDRs according to Chothia et al. (e.g., at least one, two, three, four, five, or six CDRs according to the Chothia definition as set out in Table 3) from the heavy and light chain variable regions of an antibody described herein, e.g., an antibody chosen from any one of A-H.1 to A-H.68, e.g., A-H.1, A-H.2 or A-H.68, or an antibody described in Table 3, or encoded by the nucleotide sequence in Table 3; or a sequence substantially identical (e.g., at least 80%, 85%, 90%, 92%, 95%, 97%, 98%, 99% or higher identical) to any of the aforesaid sequences; or which have at least one amino acid alteration, but not more than two, three or four alterations (e.g., substitutions, deletions, or insertions, e.g., conservative substitutions) relative to one, two, three, four, five, or six CDRs according to Chothia et al. shown in Table 3.

[0651] In some embodiments, the anti-TCRβV antibody molecule, e.g., anti-TCRβV6 (e.g., anti-TCRβ V6-5*01) antibody molecule, includes all six CDRs according to Chothia et al. (e.g., all six CDRs according to the Chothia definition as set out in Table 3) from the heavy and light chain variable regions of an antibody described herein, e.g., an antibody chosen from any one of A-H.1 to A-H.68, e.g., A-H.1, A-H.2 or A-H.68, or an antibody described in Table 3, or encoded by a nucleotide sequence in Table 3; or a sequence substantially identical (e.g., at least 80%, 85%, 90%, 92%, 95%, 97%, 98%, 99% or higher identical) to any of the aforesaid sequences; or which have at least one amino acid alteration, but not more than two, three or four alterations (e.g., substitutions, deletions, or insertions, e.g., conservative substitutions) relative to all six CDRs according to Chothia et al. shown in Table 3. In one embodiment, the anti-TCRβV antibody molecule, e.g., anti-TCRβV6 (e.g., anti-TCRβ V6-5*01) antibody molecule, may include any CDR described herein.

[0652] In some embodiments, the anti-TCRβV antibody molecule, e.g., anti-TCRβV6 (e.g., anti-TCRβ V6-5*01) antibody molecule, molecule includes a combination of CDRs or hypervariable loops defined according to Kabat et al., Chothia et al., or as described in Table 3.

[0653] In some embodiments, the anti-TCRβV antibody molecule, e.g., anti-TCRβV6 (e.g., anti-TCRβ V6-5*01) antibody molecule, can contain any combination of CDRs or hypervariable loops according to the Kabat and Chothia definitions.

[0654] In some embodiments, a combined CDR as set out in Table 3 is a CDR that comprises a Kabat CDR and a Chothia CDR.

[0655] In some embodiments, the anti-TCRβV antibody molecule, e.g., anti-TCRβV6 (e.g., anti-TCRβ V6-5*01) antibody molecule, molecule includes a combination of CDRs or hypervariable loops identified as combined CDRs in Table 3. In some embodiments, the anti-TCRβV antibody molecule, e.g., anti-TCRβV6 (e.g., anti-TCRβ V6-5*01) antibody molecule, can contain any combination of CDRs or hypervariable loops according the “combined” CDRs are described in Table 3.

[0656] In an embodiment, e.g., an embodiment comprising a variable region, a CDR (e.g., a combined CDR, Chothia CDR or Kabat CDR), or other sequence referred to herein, e.g., in Table 3, the antibody molecule is a monospecific antibody molecule, a bispecific antibody molecule, a bivalent antibody molecule, a biparatopic antibody molecule, or an antibody molecule that comprises an antigen binding fragment of an antibody, e.g., a half antibody or antigen binding fragment of a half antibody. In certain embodiments the antibody molecule comprises a multispecific molecule, e.g., a bispecific molecule, e.g., as described herein.

[0657] In an embodiment, the anti-TCRβV antibody molecule, e.g., anti-TCRβV6 (e.g., anti-TCRβV6-5*01) antibody molecule includes:
[0658] (i) one, two or all of a light chain complementarity determining region 1 (LC CDR1), a light chain complementarity determining region 2 (LC CDR2), and a light chain complementarity determining region 3 (LC CDR3) of SEQ ID NO: 2, SEQ ID NO: 10 or SEQ ID NO: 11, and/or
[0659] (ii) one, two or all of a heavy chain complementarity determining region 1 (HC CDR1), heavy chain complementarity determining region 2 (HC CDR2), and a heavy chain complementarity determining region 3 (HC CDR3) of SEQ ID NO: 1 or SEQ ID NO: 9.

[0660] In some embodiments, the anti-TCRβV antibody molecule, e.g., anti-TCRβV6 (e.g., anti-TCRβ V6-5*01) antibody molecule comprises a LC CDR1, LC CDR2, and LC CDR3 of SEQ ID NO: 2, and a HC CDR1, HC CDR2, and HC CDR3 of SEQ ID NO: 1.

[0661] In some embodiments the anti-TCRβV antibody molecule, e.g., anti-TCRβV6 (e.g., anti-TCRβ V6-5*01) antibody molecule comprises a LC CDR1, LC CDR2, and LC CDR3 of SEQ ID NO: 10, and a HC CDR1, HC CDR2, and HC CDR3 of SEQ ID NO: 9.

[0662] In some embodiments, the anti-TCRβV antibody molecule, e.g., anti-TCRβV6 (e.g., anti-TCRβ V6-5*01) antibody molecule comprises a LC CDR1, LC CDR2, and LC CDR3 of SEQ ID NO: 11, and a HC CDR1, HC CDR2, and HC CDR3 of SEQ ID NO: 9.

[0663] In an embodiment, the anti-TCRβV antibody molecule, e.g., anti-TCRβV6 (e.g., anti-TCRβ V6-5*01) antibody molecule comprises:
[0664] (i) a LC CDR1 amino acid sequence of SEQ ID NO: 6, a LC CDR2 amino acid sequence of SEQ ID NO: 7, or a LC CDR3 amino acid sequence of SEQ ID NO: 8; and/or
[0665] (ii) a HC CDR1 amino acid sequence of SEQ ID NO: 3, a HC CDR2 amino acid sequence of SEQ ID NO: 4, or a HC CDR3 amino acid sequence of SEQ ID NO: 5.

[0666] In some embodiments, the anti-TCRβV antibody molecule, e.g., anti-TCRβV6 (e.g., anti-TCRβ V6-5*01) antibody molecule comprises:
[0667] (i) a light chain variable region (VL) comprising a LC CDR1 amino acid sequence of SEQ ID NO: 6, a LC CDR2 amino acid sequence of SEQ ID NO: 7, or a LC CDR3 amino acid sequence of SEQ ID NO: 8; and/or
[0668] (ii) a heavy chain variable region (VH) comprising a HC CDR1 amino acid sequence of SEQ ID NO: 3, a HC CDR2 amino acid sequence of SEQ ID NO: 4, or a HC CDR3 amino acid sequence of SEQ ID NO: 5.

[0669] In an embodiment, the anti-TCRβV antibody molecule, e.g., anti-TCRβV6 (e.g., anti-TCR(3 V6-5*01) antibody molecule comprises:
[0670] (i) a LC CDR1 amino acid sequence of SEQ ID NO: 51, a LC CDR2 amino acid sequence of SEQ ID NO: 52, or a LC CDR3 amino acid sequence of SEQ ID NO: 53; and/or
[0671] (ii) a HC CDR1 amino acid sequence of SEQ ID NO: 45, a HC CDR2 amino acid sequence of SEQ ID NO: 46, or a HC CDR3 amino acid sequence of SEQ ID NO: 47.

[0672] In some embodiments, the anti-TCRβV antibody molecule, e.g., anti-TCRβV6 (e.g., anti-TCRβ V6-5*01) antibody molecule comprises:
[0673] (i) a light chain variable region (VL) comprising a LC CDR1 amino acid sequence of SEQ ID NO: 51, a LC CDR2 amino acid sequence of SEQ ID NO: 52, or a LC CDR3 amino acid sequence of SEQ ID NO: 53; and/or
[0674] (ii) a heavy chain variable region (VH) comprising a HC CDR1 amino acid sequence of SEQ ID NO: 45, a HC CDR2 amino acid sequence of SEQ ID NO: 46, or a HC CDR3 amino acid sequence of SEQ ID NO: 47.

[0675] In an embodiment, the anti-TCRβV antibody molecule, e.g., anti-TCRβV6 (e.g., anti-TCRβV6-5*01) antibody molecule comprises:
[0676] (i) a LC CDR1 amino acid sequence of SEQ ID NO: 54, a LC CDR2 amino acid sequence of SEQ ID NO: 55, or a LC CDR3 amino acid sequence of SEQ ID NO: 56; and/or
[0677] (ii) a HC CDR1 amino acid sequence of SEQ ID NO: 48, a HC CDR2 amino acid sequence of SEQ ID NO: 49, or a HC CDR3 amino acid sequence of SEQ ID NO: 50.

[0678] In some embodiments, the anti-TCRβV antibody molecule, e.g., anti-TCRβV6 (e.g., anti-TCRβ V6-5*01) antibody molecule comprises:
[0679] (i) a light chain variable region (VL) comprising a LC CDR1 amino acid sequence of SEQ ID NO: 54, a LC CDR2 amino acid sequence of SEQ ID NO: 55, or a LC CDR3 amino acid sequence of SEQ ID NO: 56; and/or
[0680] (ii) a heavy chain variable region (VH) comprising a HC CDR1 amino acid sequence of SEQ ID NO: 48, a HC CDR2 amino acid sequence of SEQ ID NO: 49, or a HC CDR3 amino acid sequence of SEQ ID NO: 50.

[0681] In one embodiment, the light or the heavy chain variable framework (e.g., the region encompassing at least FR1, FR2, FR3, and optionally FR4) of the anti-TCRβV antibody molecule, e.g., anti-TCRβV6 (e.g., anti-TCRβ V6-5*01) antibody molecule can be chosen from: (a) a light or heavy chain variable framework including at least 80%, 85%, 87% 90%, 92%, 93%, 95%, 97%, 98%, or 100% of the amino acid residues from a human light or heavy chain variable framework, e.g., a light or heavy chain variable framework residue from a human mature antibody, a human germline sequence, or a human consensus sequence; (b) a light or heavy chain variable framework including from 20% to 80%, 40% to 60%, 60% to 90%, or 70% to 95% of the amino acid residues from a human light or heavy chain variable framework, e.g., a light or heavy chain variable framework residue from a human mature antibody, a human germline sequence, or a human consensus sequence; (c) a non-human framework (e.g., a rodent framework); or (d) a non-human framework that has been modified, e.g., to remove antigenic or cytotoxic determinants, e.g., deimmunized, or partially humanized. In one embodiment, the light or heavy chain variable framework region (particularly FR1, FR2 and/or FR3) includes a light or heavy chain variable framework sequence at least 70, 75, 80, 85, 87, 88, 90, 92, 94, 95, 96, 97, 98, 99% identical or identical to the frameworks of a VL or VH segment of a human germline gene.

[0682] In some embodiments, the anti-TCRβV antibody molecule, e.g., anti-TCRβV6 (e.g., anti-TCRβ V6-5*01) antibody molecule, comprises a heavy chain variable domain having at least one, two, three, four, five, six, seven, ten, fifteen, twenty or more changes, e.g., amino acid substitutions or deletions, from an amino acid sequence of any one of A-H.1 to A-H.68, e.g., A-H.1, A-H.2 or A-H.68, e.g., the amino acid sequence of the FR region in the entire variable region, e.g., shown in FIG. 1A, or in SEQ ID NO: 9.

[0683] Alternatively, or in combination with the heavy chain substitutions described herein, the anti-TCRβV antibody molecule, e.g., anti-TCRβV6 (e.g., anti-TCRβ V6-5*01) antibody molecule, comprises a light chain variable domain having at least one, two, three, four, five, six, seven, ten, fifteen, twenty or more amino acid changes, e.g., amino acid substitutions or deletions, from an amino acid sequence of any one of A-H.1 to A-H.68, e.g., A-H.1, A-H.2 or A-H.68, e.g., the amino acid sequence of the FR region in the entire variable region, e.g., shown in FIG. 1B, or in SEQ ID NO: 10 or SEQ ID NO: 11.

[0684] In some embodiments, the anti-TCRβV antibody molecule, e.g., anti-TCRβV6 (e.g., anti-TCRβ V6-5*01) antibody molecule, includes one, two, three, or four heavy chain framework regions shown in FIG. 1A, or a sequence substantially identical thereto.

[0685] In some embodiments, the anti-TCRβV antibody molecule, e.g., anti-TCRβV6 (e.g., anti-TCRβ V6-5*01) antibody molecule, includes one, two, three, or four light chain framework regions shown in FIG. 1B, or a sequence substantially identical thereto.

[0686] In some embodiments, the anti-TCRβV antibody molecule, e.g., anti-TCRβV6 (e.g., anti-TCRβ V6-5*01) antibody molecule, comprises the light chain framework region 1 of A-H.1 or A-H.2, e.g., as shown in FIG. 1B.

[0687] In some embodiments, the anti-TCRβV antibody molecule, e.g., anti-TCRβV6 (e.g., anti-TCRβ V6-5*01) antibody molecule, comprises the light chain framework region 2 of A-H.1 or A-H.2, e.g., as shown in FIG. 1B.

[0688] In some embodiments, the anti-TCRβV antibody molecule, e.g., anti-TCRβV6 (e.g., anti-TCRβ V6-5*01) antibody molecule, comprises the light chain framework region 3 of A-H.1 or A-H.2, e.g., as shown in FIG. 1B.

[0689] In some embodiments, the anti-TCRβV antibody molecule, e.g., anti-TCRβV6 (e.g., anti-TCRβ V6-5*01) antibody molecule, comprises the light chain framework region 4 of A-H.1 or A-H.2, e.g., as shown in FIG. 1B.

[0690] In some embodiments, the anti-TCRβV antibody molecule, e.g., anti-TCRβV6 (e.g., anti-TCRβ V6-5*01) antibody molecule, comprises a light chain variable domain comprising a framework region, e.g., framework region 1 (FR1), comprising a change, e.g., a substitution (e.g., a conservative substitution) at position 10 according to Kabat numbering. In some embodiments, the FR1 comprises a Phenylalanine at position 10, e.g., a Serine to Phenyalanine substitution. In some embodiments, the substitution is relative to a human germline light chain framework region sequence.

[0691] In some embodiments, the anti-TCRβV antibody molecule, e.g., anti-TCRβV6 (e.g., anti-TCRβ V6-5*01) antibody molecule, comprises a light chain variable domain comprising a framework region, e.g., framework region 2 (FR2), comprising a change, e.g., a substitution (e.g., a conservative substitution) at a position disclosed herein according to Kabat numbering. In some embodiments, FR2 comprises a Histidine at position 36, e.g., a substitution at position 36 according to Kabat numbering, e.g., a Tyrosine to Histidine substitution. In some embodiments, FR2 comprises an Alanine at position 46, e.g., a substitution at position 46 according to Kabat numbering, e.g., an Arginine to Alanine substitution. In some embodiments, the substitution is relative to a human germline light chain framework region sequence.

[0692] In some embodiments, the anti-TCRβV antibody molecule, e.g., anti-TCRβV6 (e.g., anti-TCRβ V6-5*01) antibody molecule, comprises a light chain variable domain comprising a framework region, e.g., framework region 3 (FR3), comprising a change, e.g., a substitution (e.g., a conservative substitution) at a position disclosed herein according to Kabat numbering. In some embodiments, FR3 comprises a Phenyalanine at position 87, e.g., a substitution at position 87 according to Kabat numbering, e.g., a Tyrosine to Phenyalanine substitution. In some embodiments, the substitution is relative to a human germline light chain framework region sequence.

[0693] In some embodiments, the anti-TCRβV antibody molecule, e.g., anti-TCRβV6 (e.g., anti-TCRβ V6-5*01) antibody molecule, comprises a light chain variable domain comprising: (a) a framework region 1 (FR1) comprising a Phenylalanine at position 10, e.g., a substitution at position 10 according to Kabat numbering, e.g., a Serine to Phenyalanine substitution; (b) a framework region 2 (FR2) comprising a Histidine at position 36, e.g., a substitution at position 36 according to Kabat numbering, e.g., a Tyrosine to Histidine substitution, and a Alanine at position 46, e.g., a substitution at position 46 according to Kabat numbering, e.g., a Arginine to Alanine substitution; and (c) a framework region 3 (FR3) comprising a Phenylalanine at position 87, e.g., a substitution at position 87 according to Kabat numbering, e.g., a Tyrosine to Phenyalanine substitution, e.g., as shown in the amino acid sequence of SEQ ID NO: 10. In some embodiments, the substitution is relative to a human germline light chain framework region sequence.

[0694] In some embodiments, the anti-TCRβV antibody molecule, e.g., anti-TCRβV6 (e.g., anti-TCRβ V6-5*01) antibody molecule, comprises a light chain variable domain comprising: (a) a framework region 2 (FR2) comprising a Histidine at position 36, e.g., a substitution at position 36 according to Kabat numbering, e.g., a Tyrosine to Histidine substitution, and a Alanine at position 46, e.g., a substitution at position 46 according to Kabat numbering, e.g., a Arginine to Alanine substitution; and (b) a framework region 3 (FR3) comprising a Phenylalanine at position 87, e.g., a substitution at position 87 according to Kabat numbering, e.g., a Tyrosine to Phenyalanine substitution, e.g., as shown in the amino acid sequence of SEQ ID NO: 11. In some embodiments, the substitution is relative to a human germline light chain framework region sequence.

[0695] In some embodiments, the anti-TCRβV antibody molecule, e.g., anti-TCRβV6 (e.g., anti-TCRβ V6-5*01) antibody molecule, comprises a light chain variable domain comprising: (a) a framework region 1 (FR1) comprising a change, e.g., a substitution (e.g., a conservative substitution) at one or more (e.g., all) positions disclosed herein according to Kabat numbering; (b) a framework region 2 (FR2) comprising a change, e.g., a substitution (e.g., a conservative substitution) at one or more (e.g., all) position disclosed herein according to Kabat numbering and (c) a framework region 3 (FR3) comprising a change, e.g., a substitution (e.g., a conservative substitution) at one or more (e.g., all) position disclosed herein according to Kabat numbering. In some embodiments, the substitution is relative to a human germline light chain framework region sequence.

[0696] In some embodiments, the anti-TCRβV antibody molecule, e.g., anti-TCRβV6 (e.g., anti-TCRβ V6-5*01) antibody molecule, comprises the heavy chain framework region 1 of A-H.1 or A-H.2, e.g., as shown in FIG. 1A.

[0697] In some embodiments, the anti-TCRβV antibody molecule, e.g., anti-TCRβV6 (e.g., anti-TCRβ V6-5*01) antibody molecule, comprises the heavy chain framework region 2 of A-H.1 or A-H.2, e.g., as shown in FIG. 1A

[0698] In some embodiments, the anti-TCRβV antibody molecule, e.g., anti-TCRβV6 (e.g., anti-TCRβ V6-5*01) antibody molecule, comprises the heavy chain framework region 3 of A-H.1 or A-H.2, e.g., as shown in FIG. 1A.

[0699] In some embodiments, the anti-TCRβV antibody molecule, e.g., anti-TCRβV6 (e.g., anti-TCRβ V6-5*01) antibody molecule, comprises the heavy chain framework region 4 of A-H.1 or A-H.2, e.g., as shown in FIG. 1A.

[0700] In some embodiments, the anti-TCRβV antibody molecule, e.g., anti-TCRβV6 (e.g., anti-TCRβ V6-5*01) antibody molecule, comprises a heavy chain variable domain comprising a framework region, e.g., framework region 3 (FR3), comprising a change, e.g., a substitution (e.g., a conservative substitution) at a position disclosed herein according to Kabat numbering. In some embodiments, FR3 comprises a Threonine at position 73, e.g., a substitution at position 73 according to Kabat numbering, e.g., a Glutamic Acid to Threonine substitution. In some embodiments, FR3 comprises a Glycine at position 94, e.g., a substitution at position 94 according to Kabat numbering, e.g., an Arginine to Glycine substitution. In some embodiments, the substitution is relative to a human germline heavy chain framework region sequence.

[0701] In some embodiments, the anti-TCRβV antibody molecule, e.g., anti-TCRβV6 (e.g., anti-TCRβ V6-5*01) antibody molecule, comprises a heavy chain variable domain comprising a framework region 3 (FR3) comprising a Threonine at position 73, e.g., a substitution at position 73 according to Kabat numbering, e.g., a Glutamic Acid to Threonine substitution, and a Glycine at position 94, e.g., a substitution at position 94 according to Kabat numbering, e.g., a Arginine to Glycine substitution, e.g., as shown in the amino acid sequence of SEQ ID NO: 10.

[0702] In some embodiments, the anti-TCRβV antibody molecule, e.g., anti-TCRβV6 (e.g., anti-TCRβ V6-5*01) antibody molecule, comprises the heavy chain framework regions 1-4 of A-H.1 or A-H.2, e.g., SEQ ID NO: 9, or as shown in FIGS. 1A and 1B.

[0703] In some embodiments, the anti-TCRβV antibody molecule, e.g., anti-TCRβV6 (e.g., anti-TCRβ V6-5*01) antibody molecule, comprises the light chain framework regions 1-4 of A-H.1, e.g., SEQ ID NO: 10, or as shown in FIGS. 1A and 1B.

[0704] In some embodiments, the anti-TCRβV antibody molecule, e.g., anti-TCRβV6 (e.g., anti-TCRβ V6-5*01) antibody molecule, comprises the light chain framework regions 1-4 of A-H.2, e.g., SEQ ID NO: 11, or as shown in FIGS. 1A and 1B.

[0705] In some embodiments, the anti-TCRβV antibody molecule, e.g., anti-TCRβV6 (e.g., anti-TCRβV6-5*01) antibody molecule, comprises the heavy chain framework regions 1-4 of A-H.1, e.g., SEQ ID NO: 9; and the light chain framework regions 1-4 of A-H.1, e.g., SEQ ID NO: 10, or as shown in FIGs. 1A and 1B.

[0706] In some embodiments, the anti-TCRβV antibody molecule, e.g., anti-TCRβV6 (e.g., anti-TCRβV6-5*01) antibody molecule, comprises the heavy chain framework regions 1-4 of A-H.2, e.g., SEQ ID NO: 9; and the light chain framework regions 1-4 of A-H.2, e.g., SEQ ID NO: 11, or as shown in FIGs. 1A and IB.

[0707] In some embodiments, the heavy or light chain variable domain, or both, of the anti-TCRβV antibody molecule, e.g., anti-TCRβV6 (e.g., anti-TCRβV6-5*01) antibody molecule, includes an amino acid sequence, which is substantially identical to an amino acid disclosed herein, e.g., at least 80%, 85%, 90%, 92%, 95%, 97%, 98%, 99% or higher identical to a variable region of an antibody described herein, e.g., an antibody chosen from any one of A-H.1 to A-H.68, e.g., A-H.1, A-H.2 or A-H.68, or as described in Table 3, or encoded by the nucleotide sequence in Table 3; or which differs at least 1 or 5 residues, but less than 40, 30, 20, or 10 residues, from a variable region of an antibody described herein.

[0708] In some embodiments, the anti-TCRβV antibody molecule, e.g., anti-TCRβV6 (e.g., anti-TCRβV6-5*01) antibody molecule, comprises at least one, two, three, or four antigen-binding regions, e.g., variable regions, having an amino acid sequence as set forth in Table 3, or a sequence substantially identical thereto (e.g., a sequence at least about 85%, 90%, 95%, 99% or more identical thereto, or which differs by no more than 1, 2, 5, 10, or 15 amino acid residues from the sequences shown in Table 3. In another embodiment, the anti-TCRβV antibody molecule, e.g., anti-TCRβV6 (e.g., anti-TCRβV6-5*01) antibody molecule includes a VH and/or VL domain encoded by a nucleic acid having a nucleotide sequence as set forth in Table 3, or a sequence substantially identical thereto (e.g., a sequence at least about 85%, 90%, 95%, 99% or more identical thereto, or which differs by no more than 3, 6, 15, 30, or 45 nucleotides from the sequences shown in Table 3.

[0709] In some embodiments, the anti-TCRβV antibody molecule, e.g., anti-TCRβV6 (e.g., anti-TCRβV6-5*01) antibody molecule, comprises: a VH domain comprising the amino acid sequence of SEQ ID NO: 9, an amino acid sequence at least about 85%, 90%, 95%, 99% or more identical to the amino acid sequence of SEQ ID NO: 9, or an amino acid sequence which differs by no more than 1, 2, 5, 10, or 15 amino acid residues from the amino acid sequence of SEQ ID NO: 9; and/or a VL domain comprising the amino acid sequence of SEQ ID NO: 10, an amino acid sequence at least about 85%, 90%, 95%, 99% or more identical to the amino acid sequence of SEQ ID NO: 10, or an amino acid sequence which differs by no more than 1, 2, 5, 10, or 15 amino acid residues from the amino acid sequence of SEQ ID NO: 10.

[0710] In some embodiments, the anti-TCRβV antibody molecule, e.g., anti-TCRβV6 (e.g., anti-TCRβV6-5*01) antibody molecule, comprises: a VH domain comprising the amino acid sequence of SEQ ID NO: 9, an amino acid sequence at least about 85%, 90%, 95%, 99% or more identical to the amino acid sequence of SEQ ID NO: 9, or an amino acid sequence which differs by no more than 1, 2, 5, 10, or 15 amino acid residues from the amino acid sequence of SEQ ID NO: 9; and/or a VL domain comprising the amino acid sequence of SEQ ID NO: 11, an amino acid sequence at least about 85%, 90%, 95%, 99% or more identical to the amino acid sequence of SEQ ID NO: 11, or an amino acid sequence which differs by no more than 1, 2, 5, 10, or 15 amino acid residues from the amino acid sequence of SEQ ID NO: 11.

[0711] In some embodiments, the anti-TCRβV antibody molecule, e.g., anti-TCRβV6 (e.g., anti-TCRβV6-5*01) antibody molecule is a full antibody or fragment thereof (e.g., a Fab, F(ab′)₂, Fv, or a single chain Fv fragment (scFv)). In embodiments, the anti-TCRβV antibody molecule, e.g., anti-TCRβV6 (e.g., anti-TCRβV6-5*01) antibody molecule is a monoclonal antibody or an antibody with single specificity. In some embodiments, the anti-TCRβV antibody molecule, e.g., anti-TCRβV6 (e.g., anti-TCRβV6-5*01) antibody molecule, can also be a humanized, chimeric, camelid, shark, or an in vitro-generated antibody molecule. In some embodiments, the anti-TCRβV antibody molecule, e.g., anti-TCRβV6 (e.g., anti-TCRβV6-5*01) antibody molecule, is a humanized antibody molecule. The heavy and light chains of the anti-TCRβV antibody molecule, e.g., anti-TCRβV6 (e.g., anti-TCRβV6-5*01) antibody molecule, can be full-length (e.g., an antibody can include at least one, and preferably two, complete heavy chains, and at least one, and preferably two, complete light chains) or can include an antigen-binding fragment (e.g., a Fab, F(ab′)₂, Fv, a single chain Fv fragment, a single domain antibody, a diabody (dAb), a bivalent antibody, or bispecific antibody or fragment thereof, a single domain variant thereof, or a camelid antibody).

[0712] In some embodiments, the anti-TCRβV antibody molecule, e.g., anti-TCRβV6 (e.g., anti-TCRβ V6-5*01) antibody molecule, is in the form of a multispecific molecule, e.g., a bispecific molecule, e.g., as described herein.

[0713] In some embodiments, the anti-TCRβV antibody molecule, e.g., anti-TCRβV6 (e.g., anti-TCRβ V6-5*01) antibody molecule, has a heavy chain constant region (Fc) chosen from, e.g., the heavy chain constant regions of IgG1, IgG2, IgG3, IgG4, IgM, IgAl, IgA2, IgD, and IgE. In some embodiments, the Fc region is chosen from the heavy chain constant regions of IgG1, IgG2, IgG3, and IgG4. In some embodiments, the Fc region is chosen from the heavy chain constant region of IgG1 or IgG2 (e.g., human IgG1, or IgG2). In some embodiments, the heavy chain constant region is human IgG1. In some embodiments, the Fc region comprises a Fc region variant, e.g., as described herein.

[0714] In some embodiments, the anti-TCRβV antibody molecule, e.g., anti-TCRβV6 (e.g., anti-TCRβ V6-5*01) antibody molecule, has a light chain constant region chosen from, e.g., the light chain constant regions of kappa or lambda, preferably kappa (e.g., human kappa). In one embodiment, the constant region is altered, e.g., mutated, to modify the properties of the anti-TCRβV antibody molecule, e.g., anti-TCRβV6 (e.g., anti-TCRβ V6-5*01) antibody molecule (e.g., to increase or decrease one or more of: Fc receptor binding, antibody glycosylation, the number of cysteine residues, effector cell function, or complement function). For example, the constant region is mutated at positions 296 (M to Y), 298 (S to T), 300 (T to E), 477 (H to K) and 478 (N to F) to alter Fc receptor binding (e.g., the mutated positions correspond to positions 132 (M to Y), 134 (S to T), 136 (T to E), 313 (H to K) and 314 (N to F) of SEQ ID NOs: 212 or 214; or positions 135 (M to Y), 137 (S to T), 139 (T to E), 316 (H to K) and 317 (N to F) of SEQ ID NOs: 215, 216, 217, or 218), e.g., relative to human IgG1.

[0715] Antibody A-H.1 comprises a heavy chain comprising the amino acid sequence of SEQ ID NO: 3278 and a light chain comprising the amino acid sequence of SEQ ID NO: 72. Antibody A-H.2 comprises a heavy chain comprising the amino acid sequence of SEQ ID NO: 3278 and a light chain comprising the amino acid sequence of SEQ ID NO: 3279. Antibody A-H.68 comprises the amino acid sequence of SEQ ID NO: 1337, or a sequence having at least 85%, 90%, 95%, 96%, 97%, 98%, or 99% identity thereto.

[0716] Additional exemplary humanized anti-TCRB V6 antibodies are provided in Table 3. In some embodiments, the anti-TCRβV6 is antibody A, e.g., humanized antibody A (antibody A-H), as provided in Table 3. In some embodiments, the anti-TCRβV antibody comprises one or more (e.g., all three) of a LC CDR1, LC CDR2, and LC CDR3 provided in Table 3; and/or one or more (e.g., all three) of a HC CDR1, HC CDR2, and HC CDR3 provided in Table 3, or a sequence with at least 85%, 90%, 95%, 96%, 97%, 98%, or 99% identity thereto. In some embodiments, antibody A comprises a variable heavy chain (VH) and/or a variable light chain (VL) provided in Table 3, or a sequence with at least 85%, 90%, 95%, 96%, 97%, 98%, or 99% identity thereto.

TABLE 3
Amino acid and nucleotide sequences for murine, chimeric and humanized
antibody molecules which bind to TCRVB 6, e.g., TCRVB 6-5. The antibody
molecules include murine mAb Antibody A, and humanized mAb Antibody A-H
Clones A-H.1 to A-H.68. The amino acid the heavy and light chain CDRs,
and the amino acid and nucleotide sequences of the heavy and light
chain variable regions, and the heavy and light chains are shown.
Antibody A (murine)

| | | |
|---|---|---|
| SEQ ID NO: 3 | HC CDR1 | GYSFTTYYIH |
| | (Combined) | |
| SEQ ID NO: 4 | HC CDR2 | WFFPGSGNIKYNEKFKG |
| | (Combined) | |
| SEQ ID NO: 5 | HC CDR3 | SYYSYDVLDY |
| | (Combined) | |
| SEQ ID NO: 45 | HC CDR1 (Kabat) | TYYIH |
| SEQ ID NO: 46 | HC CDR2 (Kabat) | WFFPGSGNIKYNEKFKG |
| SEQ ID NO: 47 | HC CDR3 (Kabat) | SYYSYDVLDY |
| SEQ ID NO: 48 | HC CDR1 (Chothia) | GYSFTTY |
| SEQ ID NO: 49 | HC CDR2 (Chothia) | FPGSGN |
| SEQ ID NO: 50 | HC CDR3 (Chothia) | SYYSYDVLDY |
| SEQ ID NO: 1 | VH | QVQLQQSGPELVKPGTSVKISCKASGYSFTTYYIHWVKQRPG |
| | | QGLEWIGWFFPGSGNIKYNEKFKGKATLTADTSSSTAYMQLS |
| | | SLTSEESAVYFCAGSYYSYDVLDYWGHGTTLTVSS |
| SEQ ID NO: 6 | LC CDR1 (Combined) | KASQNVGINVV |
| SEQ ID NO: 7 | LC CDR2 (Combined) | SSSHRYS |
| SEQ ID NO: 8 | LC CDR3 (Combined) | QQFKSYPLT |
| SEQ ID NO: 51 | LC CDR1 (Kabat) | KASQNVGINVV |
| SEQ ID NO: 52 | LC CDR2 (Kabat) | SSSHRYS |
| SEQ ID NO: 53 | LC CDR3 (Kabat) | QQFKSYPLT |
| SEQ ID NO: 54 | LC CDR1 (Chothia) | KASQNVGINVV |
| SEQ ID NO: 55 | LC CDR2 (chothia) | SSSHRYS |
| SEQ ID NO: 56 | LC CDR3 (chothia) | QQFKSYPLT |
| SEQ ID NO: 2 | VL | DILMTQSQKFMSTSLGDRVSVSCKASQNVGINVVWHQQKPGQ |
| | | SPKALIYSSSHRYSGVPDRFTGSGSGTDFTLTINNVQSEDLA |
| | | EYFCQQFKSYPLTFGAGTKLELK |

Antibody Ahumanized (A-H antibody)
A-H.1 antibody

| | | |
|---|---|---|
| SEQ ID NO: 3 | HC CDR1 | GYSFTTYYIH |
| | (Combined) | |
| SEQ ID NO: 4 | HC CDR2 | WFFPGSGNIKYNEKFKG |
| | (Combined) | |
| SEQ ID NO: 5 | HC CDR3 | SYYSYDVLDY |
| | (Combined) | |
| SEQ ID NO: 9 | VH | QVQLVQSGAEVKKPGSSVKVSCKASGYSFTTYYIHWVRQAPG |
| | | QGLEWMGWFFPGSGNIKYNEKFKGRVTITADTSTSTAYMELS |
| | | SLRSEDTAVYYCAGSYYSYDVLDYWGQGTTVTVSS |
| SEQ ID NO: 12 | DNA VH | CAGGTGCAGCTGGTTCAGTCTGGCGCCGAAGTGAAGAAACCT |
| | | GGCTCCTCCGTGAAGGTGTCCTGCAAGGCTTCCGGCTACTCC |
| | | TTCACCACCTACTACATCCACTGGGTCCGACAGGCCCCTGGA |
| | | CAAGGATTGGAATGGATGGGCTGGTTCTTCCCCGGCTCCGGC |
| | | AACATCAAGTACAACGAGAAGTTCAAGGGCCGCGTGACCATC |
| | | ACCGCCGACACCTCTACCTCTACCGCCTACATGGAACTGTCC |
| | | AGCCTGAGATCTGAGGACACCGCCGTGTACTACTGCGCCGGC |
| | | TCCTACTACTCTTACGACGTGCTGGATTACTGGGGCCAGGGC |
| | | ACCACAGTGACAGTGTCCTCT |
| SEQ ID NO: 69 | VH-IgM constant | METDTLLLWVLLLWVPGSTGQVQLVQSGAEVKKPGSSVKVSC |
| | delta CDC | KASGYSFTTYYIHWVRQAPGQGLEWMGWFFPGSGNIKYNEKF |
| | | KGRVTITADTSTSTAYMELSSLRSEDTAVYYCAGSYYSYDVL |
| | | DYWGQGTTVTVSSGSASAPTLFPLVSCENSPSDTSSVAVGCL |
| | | AQDFLPDSITFSWKYKNNSDISSTRGFPSVLRGGKYAATSQV |
| | | LLPSKDVMQGTDEHVVCKVQHPNGNKEKNVPLPVIAELPPKV |
| | | SVFVPPRDGFFGNPRKSKLICQATGFSPRQIQVSWLREGKQV |
| | | GSGVTTDQVQAEAKESGPTTYKVTSTLTIKESDWLGQSMFTC |
| | | RVDHRGLTFQQNASSMCVPDQDTAIRVFAIPPSFASIFLTKS |
| | | TKLTCLVTDLTTYDSVTISWTRQNGEAVKTHTNISESHPNAT |
| | | FSAVGEASICEDDWNSGERFTCTVTHTDLASSLKQTISRPKG |
| | | VALHRPDVYLLPPAREQLNLRESATITCLVTGFSPADVFVQW |
| | | MQRGQPLSPEKYVTSAPMPEPQAPGRYFAHSILTVSEEEWNT |
| | | GETYTCVVAHEALPNRVTERTVDKSTGKPTLYNVSLVMSDTA |
| | | GTCY |
| SEQ ID NO: 70 | VH-IgGA1 | METDTLLLWVLLLWVPGSTGQVQLVQSGAEVKKPGSSVKVSC |
| | | KASGYSFTTYYIHWVRQAPGQGLEWMGWFFPGSGNIKYNEKF |
| | | KGRVTITADTSTSTAYMELSSLRSEDTAVYYCAGSYYSYDVL |
| | | DYWGQGTTVTVSSASPTSPKVFPLSLCSTQPDGNVVIACLVQ |
| | | GFFPQEPLSVTWSESGQGVTARNFPPSQDASGDLYTTSSQLT |
| | | LPATQCLAGKSVTCHVKHYTNPSQDVTVPCPVPSTPPTPSPS |
| | | TPPTPSPSCCHPRLSLHRPALEDLLLGSEANLTCTLTGLRDA |
| | | SGVTFTWTPSSGKSAVQGPPERDLCGCYSVSSVLPGCAEPWN |
| | | HGKTFTCTAAYPESKTPLTATLSKSGNTFRPEVHLLPPPSEE |
| | | LALNELVTLTCLARGFSPKDVLVRWLQGSQELPREKYLTWAS |
| | | RQEPSQGTTTFAVTSILRVAAEDWKKGDTFSCMVGHEALPLA |
| | | FTQKTIDRLAGKPTHVNVSVVMAEVDGTCY |
| SEQ ID NO: 71 | VH-IgGA2 | METDTLLLWVLLLWVPGSTGQVQLVQSGAEVKKPGSSVKVSC |
| | | KASGYSFTTYYIHWVRQAPGQGLEWMGWFFPGSGNIKYNEKF |
| | | KGRVTITADTSTSTAYMELSSLRSEDTAVYYCAGSYYSYDVL |
| | | DYWGQGTTVTVSSASPTSPKVFPLSLDSTPQDGNVVVACLVQ |
| | | GFFPQEPLSVTWSESGQNVTARNFPPSQDASGDLYTTSSQLT |
| | | LPATQCPDGKSVTCHVKHYTNSSQDVTVPCRVPPPPPCCHPR |
| | | LSLHRPALEDLLLGSEANLTCTLTGLRDASGATFTWTPSSGK |
| | | SAVQGPPERDLCGCYSVSSVLPGCAQPWNHGETFTCTAAHPE |
| | | LKTPLTANITKSGNTFRPEVHLLPPPSEELALNELVTLTCLA |
| | | RGFSPKDVLVRWLQGSQELPREKYLTWASRQEPSQGTTTYAV |
| | | TSILRVAAEDWKKGETFSCMVGHEALPLAFTQKTIDRMAGKP |
| | | THINVSVVMAEADGTCY |
| SEQ ID NO: 3278 | Heavy chain | METDTLLLWVLLLWVPGSTGQVQLVQSGAEVKKPGSSVKVSC |
| | | KASGYSFTTYYIHWVRQAPGQGLEWMGWFFPGSGNIKYNEKF |
| | | KGRVTITADTSTSTAYMELSSLRSEDTAVYYCAGSYYSYDVL |
| | | DYWGQGTTVTVSSASTKGPSVFPLAPSSKSTSGGTAALGCLV |
| | | KDYFPEPVTVSWNSGALTSGVHTFPAVLQSSGLYSLSSVVTV |
| | | PSSSLGTQTYICNVNHKPSNTKVDKRVEPKSCDKTHTCPPCP |
| | | APELLGGPSVFLFPPKPKDTLMISRTPEVTCVVVDVSHEDPE |
| | | VKFNWYVDGVEVHNAKTKPREEQYNSTYRVVSVLTVLHQDWL |
| | | NGKEYKCKVSNKALPAPIEKTISKAKGQPREPQVYTLPPSRE |
| | | EMTKNQVSLTCLVKGFYPSDIAVEWESNGQPENNYKTTPPVL |
| | | DSDGSFFLYSKLTVDKSRWQQGNVFSCSVMHEALHNHYTQKS |
| | | LSLSPGK |
| SEQ ID NO: 6 | LC CDR1 (Combined) | KASQNVGINVV |
| SEQ ID NO: 7 | LC CDR2 (Combined) | SSSHRYS |
| SEQ ID NO: 8 | LC CDR3 (Combined) | QQFKSYPLT |
| SEQ ID NO: 10 | VL | DIQMTQSPSFLSASVGDRVTITCKASQNVGINVVWHQQKPGK |
| | | APKALIYSSSHRYSGVPSRFSGSGSGTEFTLTISSLQPEDFA |
| | | TYFCQQFKSYPLTFGQGTKLEIK |
| SEQ ID NO: 13 | DNA VL | GACATCCAGATGACCCAGTCTCCATCCTTCCTGTCCGCCTCT |
| | | GTGGGCGACAGAGTGACCATCACATGCAAGGCCTCTCAGAAC |
| | | GTGGGCATCAACGTCGTGTGGCACCAGCAGAAGCCTGGCAAG |
| | | GCTCCTAAGGCTCTGATCTACTCCTCCAGCCACCGGTACTCT |
| | | GGCGTGCCCTCTAGATTTTCCGGCTCTGGCTCTGGCACCGAG |
| | | TTTACCCTGACAATCTCCAGCCTGCAGCCTGAGGACTTCGCC |
| | | ACCTACTTTTGCCAGCAGTTCAAGAGCTACCCTCTGACCTTT |
| | | GGCCAGGGCACCAAGCTGGAAATCAAG |
| SEQ ID NO: 72 | VL and kappa | METDTLLLWVLLLWVPGSTGDIQMTQSPSFLSASVGDRVTIT |
| | constant region/ | CKASQNVGINVVWHQQKPGKAPKALIYSSSHRYSGVPSRFSG |
| | light chain | SGSGTEFTLTISSLQPEDFATYFCQQFKSYPLTFGQGTKLEI |
| | | KRTVAAPSVFIFPPSDEQLKSGTASVVCLLNNFYPREAKVQW |
| | | KVDNALQSGNSQESVTEQDSKDSTYSLSSTLTLSKADYEKHK |
| | | VYACEVTHQGLSSPVTKSFNRGEC |

A-H.2 antibody

| | | |
|---|---|---|
| SEQ ID NO: 3 | HC CDR1 | GYSFTTYYIH |
| | (Combined) | |
| SEQ ID NO: 4 | HC CDR2 | WFFPGSGNIKYNEKFKG |
| | (Combined) | |
| SEQ ID NO: 5 | HC CDR3 | SYYSYDVLDY |
| | (Combined) | |
| SEQ ID NO: 9 | VH | QVQLVQSGAEVKKPGSSVKVSCKASGYSFTTYYIHWVRQAPG |
| | | QGLEWMGWFFPGSGNIKYNEKFKGRVTITADTSTSTAYMELS |
| | | SLRSEDTAVYYCAGSYYSYDVLDYWGQGTTVTVSS |
| SEQ ID NO: 12 | DNA VH | CAGGTGCAGCTGGTTCAGTCTGGCGCCGAAGTGAAGAAACCT |
| | | GGCTCCTCCGTGAAGGTGTCCTGCAAGGCTTCCGGCTACTCC |
| | | TTCACCACCTACTACATCCACTGGGTCCGACAGGCCCCTGGA |
| | | CAAGGATTGGAATGGATGGGCTGGTTCTTCCCCGGCTCCGGC |
| | | AACATCAAGTACAACGAGAAGTTCAAGGGCCGCGTGACCATC |
| | | ACCGCCGACACCTCTACCTCTACCGCCTACATGGAACTGTCC |
| | | AGCCTGAGATCTGAGGACACCGCCGTGTACTACTGCGCCGGC |
| | | TCCTACTACTCTTACGACGTGCTGGATTACTGGGGCCAGGGC |
| | | ACCACAGTGACAGTGTCCTCT |
| SEQ ID NO: 3278 | Heavy chain | METDTLLLWVLLLWVPGSTGQVQLVQSGAEVKKPGSSVKVSC |
| | | KASGYSFTTYYIHWVRQAPGQGLEWMGWFFPGSGNIKYNEKF |
| | | KGRVTITADTSTSTAYMELSSLRSEDTAVYYCAGSYYSYDVL |
| | | DYWGQGTTVTVSSASTKGPSVFPLAPSSKSTSGGTAALGCLV |
| | | KDYFPEPVTVSWNSGALTSGVHTFPAVLQSSGLYSLSSVVTV |
| | | PSSSLGTQTYICNVNHKPSNTKVDKRVEPKSCDKTHTCPPCP |
| | | APELLGGPSVFLFPPKPKDTLMISRTPEVTCVVVDVSHEDPE |
| | | VKFNWYVDGVEVHNAKTKPREEQYNSTYRVVSVLTVLHQDWL |
| | | NGKEYKCKVSNKALPAPIEKTISKAKGQPREPQVYTLPPSRE |
| | | EMTKNQVSLTCLVKGFYPSDIAVEWESNGQPENNYKTTPPVL |
| | | DSDGSFFLYSKLTVDKSRWQQGNVFSCSVMHEALHNHYTQKS |
| | | LSLSPGK |
| SEQ ID NO: 6 | LC CDR1 (Combined) | KASQNVGINVV |
| SEQ ID NO: 7 | LC CDR2 (Combined) | SSSHRYS |
| SEQ ID NO: 8 | LC CDR3 (Combined) | QQFKSYPLT |
| SEQ ID NO: 11 | VL | DIQMTQSPSSLSASVGDRVTITCKASQNVGINVVWHQQKPGK |
| | | VPKALIYSSSHRYSGVPSRFSGSGSGTDFTLTISSLQPEDVA |
| | | TYFCQQFKSYPLTFGQGTKLEIK |
| SEQ ID NO: 14 | DNA VL | GACATCCAGATGACCCAGTCTCCATCCTCTCTGTCCGCCTCT |
| | | GTGGGCGACAGAGTGACCATCACATGCAAGGCCTCTCAGAAC |
| | | GTGGGCATCAACGTCGTGTGGCACCAGCAGAAACCTGGCAAG |
| | | GTGCCCAAGGCTCTGATCTACTCCTCCAGCCACAGATACTCC |
| | | GGCGTGCCCTCTAGATTCTCCGGCTCTGGCTCTGGCACCGAC |
| | | TTTACCCTGACAATCTCCAGCCTGCAGCCTGAGGACGTGGCC |
| | | ACCTACTTTTGCCAGCAGTTCAAGAGCTACCCTCTGACCTTT |
| | | GGCCAGGGCACCAAGCTGGAAATCAAG |
| SEQ ID NO: 3279 | Light chain | METDTLLLWVLLLWVPGSTGDIQMTQSPSSLSASVGDRVTIT |
| | | CKASQNVGINVVWHQQKPGKVPKALIYSSSHRYSGVPSRFSG |
| | | SGSGTDFTLTISSLQPEDVATYFCQQFKSYPLTFGQGTKLEI |
| | | KRTVAAPSVFIFPPSDEQLKSGTASVVCLLNNFYPREAKVQW |
| | | KVDNALQSGNSQESVTEQDSKDSTYSLSSTLTLSKADYEKHK |
| | | VYACEVTHQGLSSPVTKSFNRGEC |

A-H.3 antibody

| | | |
|---|---|---|
| SEQ ID NO: 80 | VH + VL | QVQLVQSGAEVKKPGSSVKVSCKASGTDFKLTYIHWVRQAPG |
| | | QGLEWMGRVSPGSGNTKYNEKFKGRVTITADTSTSTAYMELS |
| | | SLRSEDTAVYYCAGSYYSYDVLDYWGQGTTVTVSSGGGGSGG |
| | | GGSGGGGSGGGGSDIQMTQSPSFLSASVGDRVTITCKASQNV |
| | | EDRVAWYQQKPGKAPKALIYSSSHRYKGVPSRFSGSGSGTEF |
| | | TLTISSLQPEDFATYFCQQFKSYPLTFGQGTKLEIK |
| SEQ ID NO: 81 | VL | DIQMTQSPSFLSASVGDRVTITCKASQNVEDRVAWYQQKPGK |
| | | APKALIYSSSHRYKGVPSRFSGSGSGTEFTLTISSLQPEDFA |
| | | TYFCQQFKSYPLTFGQGTKLEIK |
| SEQ ID NO: 82 | VH | QVQLVQSGAEVKKPGSSVKVSCKASGTDFKLTYIHWVRQAPG |
| | | QGLEWMGRVSPGSGNTKYNEKFKGRVTITADTSTSTAYMELS |
| | | SLRSEDTAVYYCAGSYYSYDVLDYWGQGTTVTVSS |

A-H.4

| | | |
|---|---|---|
| SEQ ID NO: 83 | VH + VL | QVQLVQSGAEVKKPGSSVKVSCKASGTDFDKIYIHWVRQAPG |
| | | QGLEWMGRISAGSGNVKYNEKFKGRVTITADTSTSTAYMELS |
| | | SLRSEDTAVYYCAGSYYSYDVLDYWGQGTTVTVSSGGGGSGG |
| | | GGSGGGGSGGGGSDIQMTQSPSFLSASVGDRVTITCKASQNV |
| | | EDRVAWYQQKPGKAPKALIYSSSHRYKGVPSRFSGSGSGTEF |
| | | TLTISSLQPEDFATYFCQQFKSYPLTFGQGTKLEIK |
| SEQ ID NO: 84 | VL | DIQMTQSPSFLSASVGDRVTITCKASQNVEDRVAWYQQKPGK |
| | | APKALIYSSSHRYKGVPSRFSGSGSGTEFTLTISSLQPEDFA |
| | | TYFCQQFKSYPLTFGQGTKLEIK |
| SEQ ID NO: 85 | VH | QVQLVQSGAEVKKPGSSVKVSCKASGTDFDKIYIHWVRQAPG |
| | | QGLEWMGRISAGSGNVKYNEKFKGRVTITADTSTSTAYMELS |
| | | SLRSEDTAVYYCAGSYYSYDVLDYWGQGTTVTVSS |

A-H.5

| | | |
|---|---|---|
| SEQ ID NO: 86 | VH + VL | QVQLVQSGAEVKKPGSSVKVSCKASGHDFRDFYIHWVRQAPG |
| | | QGLEWMGRVYPGSGSYRYNEKFKGRVTITADTSTSTAYMELS |
| | | SLRSEDTAVYYCAGSYYSYDVLDYWGQGTTVTVSSGGGGSGG |
| | | GGSGGGGSGGGGSDIQMTQSPSFLSASVGDRVTITCKASQNV |
| | | DDRVAWYQQKPGKAPKALIYSSSHRYKGVPSRFSGSGSGTEF |
| | | TLTISSLQPEDFATYFCQQFKSYPLTFGQGTKLEIK |
| SEQ ID NO: 87 | VL | DIQMTQSPSFLSASVGDRVTITCKASQNVDDRVAWYQQKPGK |
| | | APKALIYSSSHRYKGVPSRFSGSGSGTEFTLTISSLQPEDFA |
| | | TYFCQQFKSYPLTFGQGTKLEIK |
| SEQ ID NO: 88 | VH | QVQLVQSGAEVKKPGSSVKVSCKASGHDFRDFYIHWVRQAPG |
| | | QGLEWMGRVYPGSGSYRYNEKFKGRVTITADTSTSTAYMELS |
| | | SLRSEDTAVYYCAGSYYSYDVLDYWGQGTTVTVSS |

A-H.6

| | | |
|---|---|---|
| SEQ ID NO: 89 | VH + VL | QVQLVQSGAEVKKPGSSVKVSCKASGHDFKLTYIHWVRQAPG |
| | | QGLEWMGRISAGSGNVKYNEKFKGRVTITADTSTSTAYMELS |
| | | SLRSEDTAVYYCAGSYYSYDVLDYWGQGTTVTVSSGGGGSGG |
| | | GGSGGGGSGGGGSDIQMTQSPSFLSASVGDRVTITCKASQNV |
| | | DNRVAWYQQKPGKAPKALIYSSSHRYKGVPSRFSGSGSGTEF |
| | | TLTISSLQPEDFATYFCQQFKSYPLTFGQGTKLEIK |
| SEQ ID NO: 90 | VL | DIQMTQSPSFLSASVGDRVTITCKASQNVDNRVAWYQQKPGK |
| | | APKALIYSSSHRYKGVPSRFSGSGSGTEFTLTISSLQPEDFA |
| | | TYFCQQFKSYPLTFGQGTKLEIK |
| SEQ ID NO: 91 | VH | QVQLVQSGAEVKKPGSSVKVSCKASGHDFKLTYIHWVRQAPG |
| | | QGLEWMGRISAGSGNVKYNEKFKGRVTITADTSTSTAYMELS |
| | | SLRSEDTAVYYCAGSYYSYDVLDYWGQGTTVTVSS |

A-H.7

| | | |
|---|---|---|
| SEQ ID NO: 92 | VH + VL | QVQLVQSGAEVKKPGSSVKVSCKASGTDFKLTYIHWVRQAPG |
| | | QGLEWMGRIFPGSGNVKYNEKFKGRVTITADTSTSTAYMELS |
| | | SLRSEDTAVYYCAGSYYSYDVLDYWGQGTTVTVSSGGGGSGG |
| | | GGSGGGGSGGGGSDIQMTQSPSFLSASVGDRVTITCKASQNV |
| | | ENKVAWHQQKPGKAPKALIYSSSHRYKGVPSRFSGSGSGTEF |
| | | TLTISSLQPEDFATYFCQQFKSYPLTFGQGTKLEIK |
| SEQ ID NO: 93 | VL | DIQMTQSPSFLSASVGDRVTITCKASQNVENKVAWHQQKPGK |
| | | APKALIYSSSHRYKGVPSRFSGSGSGTEFTLTISSLQPEDFA |
| | | TYFCQQFKSYPLTFGQGTKLEIK |
| SEQ ID NO: 94 | VH | QVQLVQSGAEVKKPGSSVKVSCKASGTDFKLTYIHWVRQAPG |
| | | QGLEWMGRIFPGSGNVKYNEKFKGRVTITADTSTSTAYMELS |
| | | SLRSEDTAVYYCAGSYYSYDVLDYWGQGTTVTVSS |

A-H.8

| | | |
|---|---|---|
| SEQ ID NO: 95 | VH + VL | QVQLVQSGAEVKKPGSSVKVSCKASGTDFDKIYIHWVRQAPG |
| | | QGLEWMGRIFAGSGNTKYNEKFKGRVTITADTSTSTAYMELS |
| | | SLRSEDTAVYYCAGSYYSYDVLDYWGQGTTVTVSSGGGGSGG |
| | | GGSGGGGSGGGGSDIQMTQSPSFLSASVGDRVTITCKASQNV |
| | | DDRVAWYQQKPGKAPKALIYSSSHRYKGVPSRFSGSGSGTEF |
| | | TLTISSLQPEDFATYFCQQFKSYPLTFGQGTKLEIK |
| SEQ ID NO: 96 | VL | DIQMTQSPSFLSASVGDRVTITCKASQNVDDRVAWYQQKPGK |
| | | APKALIYSSSHRYKGVPSRFSGSGSGTEFTLTISSLQPEDFA |
| | | TYFCQQFKSYPLTFGQGTKLEIK |
| SEQ ID NO: 97 | VH | QVQLVQSGAEVKKPGSSVKVSCKASGTDFDKIYIHWVRQAPG |
| | | QGLEWMGRIFAGSGNTKYNEKFKGRVTITADTSTSTAYMELS |
| | | SLRSEDTAVYYCAGSYYSYDVLDYWGQGTTVTVSS |

A-H.9

| | | |
|---|---|---|
| SEQ ID NO: 98 | VH + VL | QVQLVQSGAEVKKPGSSVKVSCKASGHDFDKFYIHWVRQAPG |
| | | QGLEWMGRVSAGSGNVKYNEKFKGRVTITADTSTSTAYMELS |
| | | SLRSEDTAVYYCAGSYYSYDVLDYWGQGTTVTVSSGGGGSGG |
| | | GGSGGGGSGGGGSDIQMTQSPSFLSASVGDRVTITCKASQNV |
| | | GNRVAWYQQKPGKAPKALIYSSSHRYSGVPSRFSGSGSGTEF |
| | | TLTISSLQPEDFATYFCQQFKSYPLTFGQGTKLEIK |
| SEQ ID NO: 99 | VL | DIQMTQSPSFLSASVGDRVTITCKASQNVGNRVAWYQQKPGK |
| | | APKALIYSSSHRYSGVPSRFSGSGSGTEFTLTISSLQPEDFA |
| | | TYFCQQFKSYPLTFGQGTKLEIK |
| SEQ ID NO: 100 | VH | QVQLVQSGAEVKKPGSSVKVSCKASGHDFDKFYIHWVRQAPG |
| | | QGLEWMGRVSAGSGNVKYNEKFKGRVTITADTSTSTAYMELS |
| | | SLRSEDTAVYYCAGSYYSYDVLDYWGQGTTVTVSS |

A-H.10

| | | |
|---|---|---|
| SEQ ID NO: 101 | VH + VL | QVQLVQSGAEVKKPGSSVKVSCKASGHDFDKFYIHWVRQAPG |
| | | QGLEWMGRIFAGSGNVKYNEKFKGRVTITADTSTSTAYMELS |
| | | SLRSEDTAVYYCAGSYYSYDVLDYWGQGTTVTVSSGGGGSGG |
| | | GGSGGGGSGGGGSDIQMTQSPSFLSASVGDRVTITCKASQNV |
| | | GDRVAWYQQKPGKAPKALIYSSSHRYKGVPSRFSGSGSGTEF |
| | | TLTISSLQPEDFATYFCQQFKSYPLTFGQGTKLEIKs |
| SEQ ID NO: 102 | VL | DIQMTQSPSFLSASVGDRVTITCKASQNVGDRVAWYQQKPGK |
| | | APKALIYSSSHRYKGVPSRFSGSGSGTEFTLTISSLQPEDFA |
| | | TYFCQQFKSYPLTFGQGTKLEIK |
| SEQ ID NO: 103 | VH | QVQLVQSGAEVKKPGSSVKVSCKASGHDFDKFYIHWVRQAPG |
| | | QGLEWMGRIFAGSGNVKYNEKFKGRVTITADTSTSTAYMELS |
| | | SLRSEDTAVYYCAGSYYSYDV |
| | | LDYWGQGTTVTVSS |

A-H.11

| | | |
|---|---|---|
| SEQ ID NO: 104 | VH + VL | QVQLVQSGAEVKKPGSSVKVSCKASGTDFKLTYIHWVRQAPG |
| | | QGLEWMGRVSPGSGNVKYNEKFKGRVTITADTSTSTAYMELS |
| | | SLRSEDTAVYYCAGSYYSYDVLDYWGQGTTVTVSSGGGGSGG |
| | | GGSGGGGSGGGGSDIQMTQSPSFLSASVGDRVTITCKASQNV |
| | | GDRVAWYQQKPGKAPKALIYSSSHRYKGVPSRFSGSGSGTEF |
| | | TLTISSLQPEDFATYFCQQFKSYPLTFGQGTKLEIK |
| SEQ ID NO: 105 | VL | DIQMTQSPSFLSASVGDRVTITCKASQNVGDRVAWYQQKPGK |
| | | APKALIYSSSHRYKGVPSRFSGSGSGTEFTLTISSLQPEDFA |
| | | TYFCQQFKSYPLTFGQGTKLEIK |
| SEQ ID NO: 106 | VH | QVQLVQSGAEVKKPGSSVKVSCKASGTDFKLTYIHWVRQAPG |
| | | QGLEWMGRVSPGSGNVKYNEKFKGRVTITADTSTSTAYMELS |
| | | SLRSEDTAVYYCAGSYYSYDVLDYWGQGTTVTVSS |

A-H.12

| | | |
|---|---|---|
| SEQ ID NO: 107 | VH + VL | QVQLVQSGAEVKKPGSSVKVSCKASGTDFDKIYIHWVRQAPG |
| | | QGLEWMGRVSAGSGNTKYNEKFKGRVTITADTSTSTAYMELS |
| | | SLRSEDTAVYYCAGSYYSYDVLDYWGQGTTVTVSSGGGGSGG |
| | | GGSGGGGSGGGGSDIQMTQSPSFLSASVGDRVTITCKASQNV |
| | | GNRVAWYQQKPGKAPKALIYSSSHRYKGVPSRFSGSGSGTEF |
| | | TLTISSLQPEDFATYFCQQFKSYPLTFGQGTKLEIK |
| SEQ ID NO: 108 | VL | DIQMTQSPSFLSASVGDRVTITCKASQNVGNRVAWYQQKPGK |
| | | APKALIYSSSHRYKGVPSRFSGSGSGTEFTLTISSLQPEDFA |
| | | TYFCQQFKSYPLTFGQGTKLEIK |
| SEQ ID NO 109 | VH | QVQLVQSGAEVKKPGSSVKVSCKASGTDFDKIYIHWVRQAPG |
| | | QGLEWMGRVSAGSGNTKYNEKFKGRVTITADTSTSTAYMELS |
| | | SLRSEDTAVYYCAGSYYSYDVLDYWGQGTTVTVSS |

A-H.13

| | | |
|---|---|---|
| SEQ ID NO: 110 | VH + VL | QVQLVQSGAEVKKPGSSVKVSCKASGTDFKLTYIHWVRQAPG |
| | | QGLEWMGRIFPGSGNVKYNEKFKGRVTITADTSTSTAYMELS |
| | | SLRSEDTAVYYCAGSYYSYDVLDYWGQGTTVTVSSGGGGSGG |
| | | GGSGGGGSGGGGSDIQMTQSPSFLSASVGDRVTITCKASQNV |
| | | DNRVAWYQQKPGKAPKALIYSSSHRYKGVPSRFSGSGSGTEF |
| | | TLTISSLQPEDFATYFCQQFKSYPLTFGQGTKLEIK |
| SEQ ID NO: 111 | VL | DIQMTQSPSFLSASVGDRVTITCKASQNVDNRVAWYQQKPGK |
| | | APKALIYSSSHRYKGVPSRFSGSGSGTEFTLTISSLQPEDFA |
| | | TYFCQQFKSYPLTFGQGTKLEIK |
| SEQ ID NO: 112 | VH | QVQLVQSGAEVKKPGSSVKVSCKASGTDFKLTYIHWVRQAPG |
| | | QGLEWMGRIFPGSGNVKYNEKFKGRVTITADTSTSTAYMELS |
| | | SLRSEDTAVYYCAGSYYSYDVLDYWGQGTTVTVSS |

A-H.14

| | | |
|---|---|---|
| SEQ ID NO: 113 | VH + VL | QVQLVQSGAEVKKPGSSVKVSCKASGTDFDKIYIHWVRQAPG |
| | | QGLEWMGRISAGSGNTKYNEKFKGRVTITADTSTSTAYMELS |
| | | SLRSEDTAVYYCAGSYYSYDVLDYWGQGTTVTVSSGGGGSGG |
| | | GGSGGGGSGGGGSDIQMTQSPSFLSASVGDRVTITCKASQNV |
| | | DDRVAWYQQKPGKAPKALIYSSSHRYKGVPSRFSGSGSGTEF |
| | | TLTISSLQPEDFATYFCQQFKSYPLTFGQGTKLEIK |
| SEQ ID NO: 114 | VL | DIQMTQSPSFLSASVGDRVTITCKASQNVDDRVAWYQQKPGK |
| | | APKALIYSSSHRYKGVPSRFSGSGSGTEFTLTISSLQPEDFA |
| | | TYFCQQFKSYPLTFGQGTKLEIK |
| SEQ ID NO: 115 | VH | QVQLVQSGAEVKKPGSSVKVSCKASGTDFDKIYIHWVRQAPG |
| | | QGLEWMGRISAGSGNTKYNEKFKGRVTITADTSTSTAYMELS |
| | | SLRSEDTAVYYCAGSYYSYDVLDYWGQGTTVTVSS |

A-H.15

| | | |
|---|---|---|
| SEQ ID NO: 116 | VH + VL | QVQLVQSGAEVKKPGSSVKVSCKASGTDFRLTYIHWVRQAPG |
| | | QGLEWMGRVSPGSGNTKYNEKFKGRVTITADTSTSTAYMELS |
| | | SLRSEDTAVYYCAGSYYSYDVLDYWGQGTTVTVSSGGGGSGG |
| | | GGSGGGGSGGGGSDIQMTQSPSFLSASVGDRVTITCKASQNV |
| | | DNKVAWHQQKPGKAPKALIYSSSHRYKGVPSRFSGSGSGTEF |
| | | TLTISSLQPEDFATYFCQQFKSYPLTFGQGTKLEIK |
| SEQ ID NO: 117 | VL | DIQMTQSPSFLSASVGDRVTITCKASQNVDNKVAWHQQKPGK |
| | | APKALIYSSSHRYKGVPSRFSGSGSGTEFTLTISSLQPEDFA |
| | | TYFCQQFKSYPLTFGQGTKLEIK |
| SEQ ID NO: 118 | VH | QVQLVQSGAEVKKPGSSVKVSCKASGTDFRLTYIHWVRQAPG |
| | | QGLEWMGRVSPGSGNTKYNEKFKGRVTITADTSTSTAYMELS |
| | | SLRSEDTAVYYCAGSYYSYDVLDYWGQGTTVTVSS |

A-H.16

| | | |
|---|---|---|
| SEQ ID NO: 119 | VH + VL | QVQLVQSGAEVKKPGSSVKVSCKASGGTFRLTYIHWVRQAPG |
| | | QGLEWMGRVYPGSGNTKYNEKFKGRVTITADTSTSTAYMELS |
| | | SLRSEDTAVYYCAGSYYSYDVLDYWGQGTTVTVSSGGGGSGG |
| | | GGSGGGGSGGGGSDIQMTQSPSFLSASVGDRVTITCKASQNV |
| | | DDRVAWYQQKPGKAPKALIYSSSHRYKGVPSRFSGSGSGTEF |
| | | TLTISSLQPEDFATYFCQQFKSYPLTFGQGTKLEIK |
| SEQ ID NO: 120 | VL | DIQMTQSPSFLSASVGDRVTITCKASQNVDDRVAWYQQKPGK |
| | | APKALIYSSSHRYKGVPSRFSGSGSGTEFTLTISSLQPEDFA |
| | | TYFCQQFKSYPLTFGQGTKLEIK |
| SEQ ID NO: 121 | VH | QVQLVQSGAEVKKPGSSVKVSCKASGGTFRLTYIHWVRQAPG |
| | | QGLEWMGRVYPGSGNTKYNEKFKGRVTITADTSTSTAYMELS |
| | | SLRSEDTAVYYCAGSYYSYDVLDYWGQGTTVTVSS |

A-H.17

| | | |
|---|---|---|
| SEQ ID NO: 122 | VH + VL | QVQLVQSGAEVKKPGSSVKVSCKASGTDFRLTYIHWVRQAPG |
| | | QGLEWMGRIFPGSGNTKYNEKFKGRVTITADTSTSTAYMELS |
| | | SLRSEDTAVYYCAGSYYSYDVLDYWGQGTTVTVSSGGGGSGG |
| | | GGSGGGGSGGGGSDIQMTQSPSFLSASVGDRVTITCKASQNV |
| | | DDRVAWYQQKPGKAPKALIYSSSHRYKGVPSRFSGSGSGTEF |
| | | TLTISSLQPEDFATYFCQQFKSYPLTFGQGTKLEIK |
| SEQ ID NO: 123 | VL | DIQMTQSPSFLSASVGDRVTITCKASQNVDDRVAWYQQKPGK |
| | | APKALIYSSSHRYKGVPSRFSGSGSGTEFTLTISSLQPEDFA |
| | | TYFCQQFKSYPLTFGQGTKLEIK |
| SEQ ID NO: 124 | VH | QVQLVQSGAEVKKPGSSVKVSCKASGTDFRLTYIHWVRQAPG |
| | | QGLEWMGRIFPGSGNTKYNEKFKGRVTITADTSTSTAYMELS |
| | | SLRSEDTAVYYCAGSYYSYDVLDYWGQGTTVTVSS |

A-H.18

| | | |
|---|---|---|
| SEQ ID NO: 125 | VH + VL | QVQLVQSGAEVKKPGSSVKVSCKASGTDFKLTYIHWVRQAPG |
| | | QGLEWMGRIFPGSGNVKYNEKFKGRVTITADTSTSTAYMELS |
| | | SLRSEDTAVYYCAGSYYSYDVLDYWGQGTTVTVSSGGGGSGG |
| | | GGSGGGGSGGGGSDIQMTQSPSFLSASVGDRVTITCKASQNV |
| | | EDRVAWYQQKPGKAPKALIYSSSHRYKGVPSRFSGSGSGTEF |
| | | TLTISSLQPEDFATYFCQQFKSYPLTFGQGTKLEIK |
| SEQ ID NO: 126 | VL | DIQMTQSPSFLSASVGDRVTITCKASQNVEDRVAWYQQKPGK |
| | | APKALIYSSSHRYKGVPSRFSGSGSGTEFTLTISSLQPEDFA |
| | | TYFCQQFKSYPLTFGQGTKLEIK |
| SEQ ID NO: 127 | VH | QVQLVQSGAEVKKPGSSVKVSCKASGTDFKLTYIHWVRQAPG |
| | | QGLEWMGRIFPGSGNVKYNEKFKGRVTITADTSTSTAYMELS |
| | | SLRSEDTAVYYCAGSYYSYDVLDYWGQGTTVTVSS |

A-H.19

| | | |
|---|---|---|
| SEQ ID NO: 128 | VH + VL | QVQLVQSGAEVKKPGSSVKVSCKASGGTFRLTYIHWVRQAPG |
| | | QGLEWMGRISAGSGNVKYNEKFKGRVTITADTSTSTAYMELS |
| | | SLRSEDTAVYYCAGSYYSYDVLDYWGQGTTVTVSSGGGGSGG |
| | | GGSGGGGSGGGGSDIQMTQSPSFLSASVGDRVTITCKASQNV |
| | | GDRVAWYQQKPGKAPKALIYSSSHRYKGVPSRFSGSGSGTEF |
| | | TLTISSLQPEDFATYFCQQFKSYPLTFGQGTKLEIK |
| SEQ ID NO: 129 | VL | DIQMTQSPSFLSASVGDRVTITCKASQNVGDRVAWYQQKPGK |
| | | APKALIYSSSHRYKGVPSRFSGSGSGTEFTLTISSLQPEDFA |
| | | TYFCQQFKSYPLTFGQGTKLEIK |
| SEQ ID NO: 130 | VH | QVQLVQSGAEVKKPGSSVKVSCKASGGTFRLTYIHWVRQAPG |
| | | QGLEWMGRISAGSGNVKYNEKFKGRVTITADTSTSTAYMELS |
| | | SLRSEDTAVYYCAGSYYSYDVLDYWGQGTTVTVSS |

A-H.20

| | | |
|---|---|---|
| SEQ ID NO: 131 | VH + VL | QVQLVQSGAEVKKPGSSVKVSCKASGGTFDKTYIHWVRQAPG |
| | | QGLEWMGRISAGSGNTKYNEKFKGRVTITADTSTSTAYMELS |
| | | SLRSEDTAVYYCAGSYYSYDVLDYWGQGTTVTVSSGGGGSGG |
| | | GGSGGGGSGGGGSDIQMTQSPSFLSASVGDRVTITCKASQNV |
| | | DDRVAWYQQKPGKAPKALIYSSSHRYKGVPSRFSGSGSGTEF |
| | | TLTISSLQPEDFATYFCQQFKSYPLTFGQGTKLEIK |
| SEQ ID NO: 132 | VL | DIQMTQSPSFLSASVGDRVTITCKASQNVDDRVAWYQQKPGK |
| | | APKALIYSSSHRYKGVPSRFSGSGSGTEFTLTISSLQPEDFA |
| | | TYFCQQFKSYPLTFGQGTKLEIK |
| SEQ ID NO: 133 | VH | QVQLVQSGAEVKKPGSSVKVSCKASGGTFDKTYIHWVRQAPG |
| | | QGLEWMGRISAGSGNTKYNEKFKGRVTITADTSTSTAYMELS |
| | | SLRSEDTAVYYCAGSYYSYDVLDYWGQGTTVTVSS |

A-H.21

| | | |
|---|---|---|
| SEQ ID NO: 134 | VH + VL | QVQLVQSGAEVKKPGSSVKVSCKASGHDFDKFYIHWVRQAPG |
| | | QGLEWMGRISAGSGNTKYNEKFKGRVTITADTSTSTAYMELS |
| | | SLRSEDTAVYYCAGSYYSYDVLDYWGQGTTVTVSSGGGGSGG |
| | | GGSGGGGSGGGGSDIQMTQSPSFLSASVGDRVTITCKASQNV |
| | | DDRVAWYQQKPGKAPKALIYSSSHRYKGVPSRFSGSGSGTEF |
| | | TLTISSLQPEDFATYFCQQFKSYPLTFGQGTKLEIK |
| SEQ ID NO: 135 | VL | DIQMTQSPSFLSASVGDRVTITCKASQNVDDRVAWYQQKPGK |
| | | APKALIYSSSHRYKGVPSRFSGSGSGTEFTLTISSLQPEDFA |
| | | TYFCQQFKSYPLTFGQGTKLEIK |
| SEQ ID NO: 136 | VH | QVQLVQSGAEVKKPGSSVKVSCKASGHDFDKFYIHWVRQAPG |
| | | QGLEWMGRISAGSGNTKYNEKFKGRVTITADTSTSTAYMELS |
| | | SLRSEDTAVYYCAGSYYSYDVLDYWGQGTTVTVSS |

A-H.22

| | | |
|---|---|---|
| SEQ ID NO: 137 | VH + VL | QVQLVQSGAEVKKPGSSVKVSCKASGTDFKLTYIHWVRQAPG |
| | | QGLEWMGRISAGSGNVKYNEKFKGRVTITADTSTSTAYMELS |
| | | SLRSEDTAVYYCAGSYYSYDVLDYWGQGTTVTVSSGGGGSGG |
| | | GGSGGGGSGGGGSDIQMTQSPSFLSASVGDRVTITCKASQNV |
| | | DNKVAWHQQKPGKAPKALIYSSSHRYKGVPSRFSGSGSGTEF |
| | | TLTISSLQPEDFATYFCQQFKSYPLTFGQGTKLEIK |
| SEQ ID NO: 138 | VL | DIQMTQSPSFLSASVGDRVTITCKASQNVDNKVAWHQQKPGK |
| | | APKALIYSSSHRYKGVPSRFSGSGSGTEFTLTISSLQPEDFA |
| | | TYFCQQFKSYPLTFGQGTKLEIK |
| SEQ ID NO: 139 | VH | QVQLVQSGAEVKKPGSSVKVSCKASGTDFKLTYIHWVRQAPG |
| | | QGLEWMGRISAGSGNVKYNEKFKGRVTITADTSTSTAYMELS |
| | | SLRSEDTAVYYCAGSYYSYDVLDYWGQGTTVTVSS |

A-H.23

| | | |
|---|---|---|
| SEQ ID NO: 140 | VH + VL | QVQLVQSGAEVKKPGSSVKVSCKASGHDFRLTYIHWVRQAPG |
| | | QGLEWMGRISAGSGNVKYNEKFKGRVTITADTSTSTAYMELS |
| | | SLRSEDTAVYYCAGSYYSYDVLDYWGQGTTVTVSSGGGGSGG |
| | | GGSGGGGSGGGGSDIQMTQSPSFLSASVGDRVTITCKASQNV |
| | | ADRVAWYQQKPGKAPKALIYSSSHRYKGVPSRFSGSGSGTEF |
| | | TLTISSLQPEDFATYFCQQFKSYPLTFGQGTKLEIK |
| SEQ ID NO: 141 | VL | DIQMTQSPSFLSASVGDRVTITCKASQNVADRVAWYQQKPGK |
| | | APKALIYSSSHRYKGVPSRFSGSGSGTEFTLTISSLQPEDFA |
| | | TYFCQQFKSYPLTFGQGTKLEIK |
| SEQ ID NO: 142 | VH | QVQLVQSGAEVKKPGSSVKVSCKASGHDFRLTYIHWVRQAPG |
| | | QGLEWMGRISAGSGNVKYNEKFKGRVTITADTSTSTAYMELS |
| | | SLRSEDTAVYYCAGSYYSYDVLDYWGQGTTVTVSS |

A-H.24

| | | |
|---|---|---|
| SEQ ID NO: 143 | VH + VL | QVQLVQSGAEVKKPGSSVKVSCKASGHDFHLWYIHWVRQAPG |
| | | QGLEWMGRVSAGSGNVKYNEKFKGRVTITADTSTSTAYMELS |
| | | SLRSEDTAVYYCAGSYYSYDVLDYWGQGTTVTVSSGGGGSGG |
| | | GGSGGGGSGGGGSDIQMTQSPSFLSASVGDRVTITCKASQNV |
| | | DNKVAWHQQKPGKAPKALIYSSSHRYKGVPSRFSGSGSGTEF |
| | | TLTISSLQPEDFATYFCQQFKSYPLTFGQGTKLEIK |
| SEQ ID NO: 144 | VL | DIQMTQSPSFLSASVGDRVTITCKASQNVDNKVAWHQQKPGK |
| | | APKALIYSSSHRYKGVPSRFSGSGSGTEFTLTISSLQPEDFA |
| | | TYFCQQFKSYPLTFGQGTKLEIK |
| SEQ ID NO: 145 | VH | QVQLVQSGAEVKKPGSSVKVSCKASGHDFHLWYIHWVRQAPG |
| | | QGLEWMGRVSAGSGNVKYNEKFKGRVTITADTSTSTAYMELS |
| | | SLRSEDTAVYYCAGSYYSYDVLDYWGQGTTVTVSS |

A-H.25

| | | |
|---|---|---|
| SEQ ID NO: 146 | VH + VL | QVQLVQSGAEVKKPGSSVKVSCKASGHDFHLWYIHWVRQAPG |
| | | QGLEWMGRVFAGSGNTKYNEKFKGRVTITADTSTSTAYMELS |
| | | SLRSEDTAVYYCAGSYYSYDVLDYWGQGTTVTVSSGGGGSGG |
| | | GGSGGGGSGGGGSDIQMTQSPSFLSASVGDRVTITCKASQNV |
| | | EDKVAWYQQKPGKAPKALIYSSSHRYKGVPSRFSGSGSGTEF |
| | | TLTISSLQPEDFATYFCQQFKSYPLTFGQGTKLEIK |
| SEQ ID NO: 147 | VL | DIQMTQSPSFLSASVGDRVTITCKASQNVEDKVAWYQQKPGK |
| | | APKALIYSSSHRYKGVPSRFSGSGSGTEFTLTISSLQPEDFA |
| | | TYFCQQFKSYPLTFGQGTKLEIK |
| SEQ ID NO: 148 | VH | QVQLVQSGAEVKKPGSSVKVSCKASGHDFHLWYIHWVRQAPG |
| | | QGLEWMGRVFAGSGNTKYNEKFKGRVTITADTSTSTAYMELS |
| | | SLRSEDTAVYYCAGSYYSYDVLDYWGQGTTVTVSS |

A-H.26

| | | |
|---|---|---|
| SEQ ID NO: 149 | VH + VL | QVQLVQSGAEVKKPGSSVKVSCKASGTDFKLTYIHWVRQAPG |
| | | QGLEWMGRIFPGSGNTKYNEKFKGRVTITADTSTSTAYMELS |
| | | SLRSEDTAVYYCAGSYYSYDVLDYWGQGTTVTVSSGGGGSGG |
| | | GGSGGGGSGGGGSDIQMTQSPSFLSASVGDRVTITCKASQNV |
| | | DDRVAWYQQKPGKAPKALIYSSSHRYKGVPSRFSGSGSGTEF |
| | | TLTISSLQPEDFATYFCQQFKSYPLTFGQGTKLEIK |
| SEQ ID NO: 150 | VL | DIQMTQSPSFLSASVGDRVTITCKASQNVDDRVAWYQQKPGK |
| | | APKALIYSSSHRYKGVPSRFSGSGSGTEFTLTISSLQPEDFA |
| | | TYFCQQFKSYPLTFGQGTKLEIK |
| SEQ ID NO: 151 | VH | QVQLVQSGAEVKKPGSSVKVSCKASGTDFKLTYIHWVRQAPG |
| | | QGLEWMGRIFPGSGNTKYNEKFKGRVTITADTSTSTAYMELS |
| | | SLRSEDTAVYYCAGSYYSYDVLDYWGQGTTVTVSS |

A-H.27

| | | |
|---|---|---|
| SEQ ID NO: 153 | VH + VL | QVQLVQSGAEVKKPGSSVKVSCKASGTDFKLTYIHWVRQAPG |
| | | QGLEWMGRVSAGSGNVKYNEKFKGRVTITADTSTSTAYMELS |
| | | SLRSEDTAVYYCAGSYYSYDVLDYWGQGTTVTVSSGGGGSGG |
| | | GGSGGGGSGGGGSDIQMTQSPSFLSASVGDRVTITCKASQNV |
| | | GNRVAWYQQKPGKAPKALIYSSSHRYKGVPSRFSGSGSGTEF |
| | | TLTISSLQPEDFATYFCQQFKSYPLTFGQGTKLEIK |
| SEQ ID NO: 154 | VL | DIQMTQSPSFLSASVGDRVTITCKASQNVGNRVAWYQQKPGK |
| | | APKALIYSSSHRYKGVPSRFSGSGSGTEFTLTISSLQPEDFA |
| | | TYFCQQFKSYPLTFGQGTKLEIK |
| SEQ ID NO: 155 | VH | QVQLVQSGAEVKKPGSSVKVSCKASGTDFKLTYIHWVRQAPG |
| | | QGLEWMGRVSAGSGNVKYNEKFKGRVTITADTSTSTAYMELS |
| | | SLRSEDTAVYYCAGSYYSYDVLDYWGQGTTVTVSS |

A-H.28

| | | |
|---|---|---|
| SEQ ID NO: 156 | VH + VL | QVQLVQSGAEVKKPGSSVKVSCKASGTDFKLTYIHWVRQAPG |
| | | QGLEWMGRISPGSGNTKYNEKFKGRVTITADTSTSTAYMELS |
| | | SLRSEDTAVYYCAGSYYSYDVLDYWGQGTTVTVSSGGGGSGG |
| | | GGSGGGGSGGGGSDIQMTQSPSFLSASVGDRVTITCKASQNV |
| | | GDRVAWYQQKPGKAPKALIYSSSHRYKGVPSRFSGSGSGTEF |
| | | TLTISSLQPEDFATYFCQQFKSYPLTFGQGTKLEIK |
| SEQ ID NO: 157 | VL | DIQMTQSPSFLSASVGDRVTITCKASQNVGDRVAWYQQKPGK |
| | | APKALIYSSSHRYKGVPSRFSGSGSGTEFTLTISSLQPEDFA |
| | | TYFCQQFKSYPLTFGQGTKLEIK |
| SEQ ID NO: 158 | VH | QVQLVQSGAEVKKPGSSVKVSCKASGTDFKLTYIHWVRQAPG |
| | | QGLEWMGRISPGSGNTKYNEKFKGRVTITADTSTSTAYMELS |
| | | SLRSEDTAVYYCAGSYYSYDVLDYWGQGTTVTVSS |

A-H.29

| | | |
|---|---|---|
| SEQ ID NO: 159 | VH + VL | QVQLVQSGAEVKKPGSSVKVSCKASGHDFHLWYIHWVRQAPG |
| | | QGLEWMGRISPGSGNVKYNEKFKGRVTITADTSTSTAYMELS |
| | | SLRSEDTAVYYCAGSYYSYDVLDYWGQGTTVTVSSGGGGSGG |
| | | GGSGGGGSGGGGSDIQMTQSPSFLSASVGDRVTITCKASQNV |
| | | GDRVAWHQQKPGKAPKALIYSSSHRYKGVPSRFSGSGSGTEF |
| | | TLTISSLQPEDFATYFCQQFKSYPLTFGQGTKLEIK |
| SEQ ID NO: 160 | VL | DIQMTQSPSFLSASVGDRVTITCKASQNVGDRVAWHQQKPGK |
| | | APKALIYSSSHRYKGVPSRFSGSGSGTEFTLTISSLQPEDFA |
| | | TYFCQQFKSYPLTFGQGTKLEIK |
| SEQ ID NO: 161 | VH | QVQLVQSGAEVKKPGSSVKVSCKASGHDFHLWYIHWVRQAPG |
| | | QGLEWMGRISPGSGNVKYNEKFKGRVTITADTSTSTAYMELS |
| | | SLRSEDTAVYYCAGSYYSYDVLDYWGQGTTVTVSS |

A-H.31

| | | |
|---|---|---|
| SEQ ID NO: 162 | VH + VL | QVQLVQSGAEVKKPGSSVKVSCKASGHDFKLTYIHWVRQAPG |
| | | QGLEWMGRISAGSGNVKYNEKFKGRVTITADTSTSTAYMELS |
| | | SLRSEDTAVYYCAGSYYSYDVLDYWGQGTTVTVSSGGGGSGG |
| | | GGSGGGGSGGGGSDIQMTQSPSFLSASVGDRVTITCKASQNV |
| | | DDRVAWYQQKPGKAPKALIYSSSHRYKGVPSRFSGSGSGTEF |
| | | TLTISSLQPEDFATYFCQQFKSYPLTFGQGTKLEIK |
| SEQ ID NO: 163 | VL | DIQMTQSPSFLSASVGDRVTITCKASQNVDDRVAWYQQKPGK |
| | | APKALIYSSSHRYKGVPSRFSGSGSGTEFTLTISSLQPEDFA |
| | | TYFCQQFKSYPLTFGQGTKLEIK |
| SEQ ID NO: 164 | VH | QVQLVQSGAEVKKPGSSVKVSCKASGHDFKLTYIHWVRQAPG |
| | | QGLEWMGRISAGSGNVKYNEKFKGRVTITADTSTSTAYMELS |
| | | SLRSEDTAVYYCAGSYYSYDVLDYWGQGTTVTVSS |

A-H.31

| | | |
|---|---|---|
| SEQ ID NO: 165 | VH + VL | QVQLVQSGAEVKKPGSSVKVSCKASGTDFHLWYIHWVRQAPG |
| | | QGLEWMGRVFAGSGSYRYNEKFKGRVTITADTSTSTAYMELS |
| | | SLRSEDTAVYYCAGSYYSYDVLDYWGQGTTVTVSSGGGGSGG |
| | | GGSGGGGSGGGGSDIQMTQSPSFLSASVGDRVTITCKASQNV |
| | | DDRVAWYQQKPGKAPKALIYSSSHRYKGVPSRFSGSGSGTEF |
| | | TLTISSLQPEDFATYFCQQFKSYPLTFGQGTKLEIK |
| SEQ ID NO: 166 | VL | DIQMTQSPSFLSASVGDRVTITCKASQNVDDRVAWYQQKPGK |
| | | APKALIYSSSHRYKGVPSRFSGSGSGTEFTLTISSLQPEDFA |
| | | TYFCQQFKSYPLTFGQGTKLEIK |
| SEQ ID NO: 167 | VH | QVQLVQSGAEVKKPGSSVKVSCKASGTDFHLWYIHWVRQAPG |
| | | QGLEWMGRVFAGSGSYRYNEKFKGRVTITADTSTSTAYMELS |
| | | SLRSEDTAVYYCAGSYYSYDVLDYWGQGTTVTVSS |

A-H.32

| | | |
|---|---|---|
| SEQ ID NO: 168 | VH + VL | QVQLVQSGAEVKKPGSSVKVSCKASGTDFDKIYIHWVRQAPG |
| | | QGLEWMGRISAGSGNTKYNEKFKGRVTITADTSTSTAYMELS |
| | | SLRSEDTAVYYCAGSYYSYDVLDYWGQGTTVTVSSGGGGSGG |
| | | GGSGGGGSGGGGSDIQMTQSPSFLSASVGDRVTITCKASQNV |
| | | ADRVAWYQQKPGKAPKALIYSSSHRYKGVPSRFSGSGSGTEF |
| | | TLTISSLQPEDFATYFCQQFKSYPLTFGQGTKLEIK |
| SEQ ID NO: 169 | VL | DIQMTQSPSFLSASVGDRVTITCKASQNVADRVAWYQQKPGK |
| | | APKALIYSSSHRYKGVPSRFSGSGSGTEFTLTISSLQPEDFA |
| | | TYFCQQFKSYPLTFGQGTKLEIK |
| SEQ ID NO: 170 | VH | QVQLVQSGAEVKKPGSSVKVSCKASGTDFDKIYIHWVRQAPG |
| | | QGLEWMGRISAGSGNTKYNEKFKGRVTITADTSTSTAYMELS |
| | | SLRSEDTAVYYCAGSYYSYDVLDYWGQGTTVTVSS |

A-H.33

| | | |
|---|---|---|
| SEQ ID NO: 171 | VH + VL | QVQLVQSGAEVKKPGSSVKVSCKASGTDFKLTYIHWVRQAPG |
| | | QGLEWMGRISAGSGNTKYNEKFKGRVTITADTSTSTAYMELS |
| | | SLRSEDTAVYYCAGSYYSYDVLDYWGQGTTVTVSSGGGGSGG |
| | | GGSGGGGSGGGGSDIQMTQSPSFLSASVGDRVTITCKASQNV |
| | | EDRVAWYQQKPGKAPKALIYSSSHRYKGVPSRFSGSGSGTEF |
| | | TLTISSLQPEDFATYFCQQFKSYPLTFGQGTKLEIK |
| SEQ ID NO: 172 | VL | DIQMTQSPSFLSASVGDRVTITCKASQNVEDRVAWYQQKPGK |
| | | APKALIYSSSHRYKGVPSRFSGSGSGTEFTLTISSLQPEDFA |
| | | TYFCQQFKSYPLTFGQGTKLEIK |
| SEQ ID NO: 173 | VH | QVQLVQSGAEVKKPGSSVKVSCKASGTDFKLTYIHWVRQAPG |
| | | QGLEWMGRISAGSGNTKYNEKFKGRVTITADTSTSTAYMELS |
| | | SLRSEDTAVYYCAGSYYSYDV |
| | | LDYWGQGTTVTVSS |

A-H.34

| | | |
|---|---|---|
| SEQ ID NO: 174 | VH + VL | QVQLVQSGAEVKKPGSSVKVSCKASGTDFRLTYIHWVRQAPG |
| | | QGLEWMGRISPGSGNTKYNEKFKGRVTITADTSTSTAYMELS |
| | | SLRSEDTAVYYCAGSYYSYDVLDYWGQGTTVTVSSGGGGSGG |
| | | GGSGGGGSGGGGSDIQMTQSPSFLSASVGDRVTITCKASQNV |
| | | GNRVAWYQQKPGKAPKALIYSSSHRYKGVPSRFSGSGSGTEF |
| | | TLTISSLQPEDFATYFCQQFKSYPLTFGQGTKLEIK |
| SEQ ID NO: 175 | VL | DIQMTQSPSFLSASVGDRVTITCKASQNVGNRVAWYQQKPGK |
| | | APKALIYSSSHRYKGVPSRFSGSGSGTEFTLTISSLQPEDFA |
| | | TYFCQQFKSYPLTFGQGTKLEIK |
| SEQ ID NO: 176 | VH | QVQLVQSGAEVKKPGSSVKVSCKASGTDFRLTYIHWVRQAPG |
| | | QGLEWMGRISPGSGNTKYNEKFKGRVTITADTSTSTAYMELS |
| | | SLRSEDTAVYYCAGSYYSYDVLDYWGQGTTVTVSS |

A-H.35

| | | |
|---|---|---|
| SEQ ID NO: 177 | VH + VL | QVQLVQSGAEVKKPGSSVKVSCKASGHDFDKTYIHWVRQAPG |
| | | QGLEWMGRVSAGSGNVKYNEKFKGRVTITADTSTSTAYMELS |
| | | SLRSEDTAVYYCAGSYYSYDVLDYWGQGTTVTVSSGGGGSGG |
| | | GGSGGGGSGGGGSDIQMTQSPSFLSASVGDRVTITCKASQNV |
| | | EDRVAWYQQKPGKAPKALIYSSSHRYKGVPSRFSGSGSGTEF |
| | | TLTISSLQPEDFATYFCQQFKSYPLTFGQGTKLEIK |
| SEQ ID NO: 178 | VL | DIQMTQSPSFLSASVGDRVTITCKASQNVEDRVAWYQQKPGK |
| | | APKALIYSSSHRYKGVPSRFSGSGSGTEFTLTISSLQPEDFA |
| | | TYFCQQFKSYPLTFGQGTKLEIK |
| SEQ ID NO: 179 | VH | QVQLVQSGAEVKKPGSSVKVSCKASGHDFDKTYIHWVRQAPG |
| | | QGLEWMGRVSAGSGNVKYNEKFKGRVTITADTSTSTAYMELS |
| | | SLRSEDTAVYYCAGSYYSYDVLDYWGQGTTVTVSS |

A-H.36

| | | |
|---|---|---|
| SEQ ID NO: 180 | VH + VL | QVQLVQSGAEVKKPGSSVKVSCKASGHDFKLTYIHWVRQAPG |
| | | QGLEWMGRVSPGSGNTKYNEKFKGRVTITADTSTSTAYMELS |
| | | SLRSEDTAVYYCAGSYYSYDVLDYWGQGTTVTVSSGGGGSGG |
| | | GGSGGGGSGGGGSDIQMTQSPSFLSASVGDRVTITCKASQNV |
| | | EDRVAWHQQKPGKAPKALIYSSSHRYKGVPSRFSGSGSGTEF |
| | | TLTISSLQPEDFATYFCQQFKSYPLTFGQGTKLEIK |
| SEQ ID NO: 181 | VL | DIQMTQSPSFLSASVGDRVTITCKASQNVEDRVAWHQQKPGK |
| | | APKALIYSSSHRYKGVPSRFSGSGSGTEFTLTISSLQPEDFA |
| | | TYFCQQFKSYPLTFGQGTKLEIK |
| SEQ ID NO: 182 | VH | QVQLVQSGAEVKKPGSSVKVSCKASGHDFKLTYIHWVRQAPG |
| | | QGLEWMGRVSPGSGNTKYNEKFKGRVTITADTSTSTAYMELS |
| | | SLRSEDTAVYYCAGSYYSYDVLDYWGQGTTVTVSS |

A-H.37

| | | |
|---|---|---|
| SEQ ID NO: 183 | VH + VL | QVQLVQSGAEVKKPGSSVKVSCKASGHDFDKTYIHWVRQAPG |
| | | QGLEWMGRIYPGSGNVKYNEKFKGRVTITADTSTSTAYMELS |
| | | SLRSEDTAVYYCAGSYYSYDVLDYWGQGTTVTVSSGGGGSGG |
| | | GGSGGGGSGGGGSDIQMTQSPSFLSASVGDRVTITCKASQNV |
| | | ADRVAWYQQKPGKAPKALIYSSSHRYKGVPSRFSGSGSGTEF |
| | | TLTISSLQPEDFATYFCQQFKSYPLTFGQGTKLEIK |
| SEQ ID NO: 184 | VL | DIQMTQSPSFLSASVGDRVTITCKASQNVADRVAWYQQKPGK |
| | | APKALIYSSSHRYKGVPSRFSGSGSGTEFTLTISSLQPEDFA |
| | | TYFCQQFKSYPLTFGQGTKLEIK |
| SEQ ID NO: 185 | VH | QVQLVQSGAEVKKPGSSVKVSCKASGHDFDKTYIHWVRQAPG |
| | | QGLEWMGRIYPGSGNVKYNEKFKGRVTITADTSTSTAYMELS |
| | | SLRSEDTAVYYCAGSYYSYDV |
| | | LDYWGQGTTVTVSS |

A-H.38

| | | |
|---|---|---|
| SEQ ID NO: 186 | VH + VL | QVQLVQSGAEVKKPGSSVKVSCKASGTDFDKTYIHWVRQAPG |
| | | QGLEWMGRISAGSGNVKYNEKFKGRVTITADTSTSTAYMELS |
| | | SLRSEDTAVYYCAGSYYSYDVLDYWGQGTTVTVSSGGGGSGG |
| | | GGSGGGGSGGGGSDIQMTQSPSFLSASVGDRVTITCKASQNV |
| | | DDRVAWYQQKPGKAPKALIYSSSHRYKGVPSRFSGSGSGTEF |
| | | TLTISSLQPEDFATYFCQQFKSYPLTFGQGTKLEIK |
| SEQ ID NO: 187 | VL | DIQMTQSPSFLSASVGDRVTITCKASQNVDDRVAWYQQKPGK |
| | | APKALIYSSSHRYKGVPSRFSGSGSGTEFTLTISSLQPEDFA |
| | | TYFCQQFKSYPLTFGQGTKLEIK |
| SEQ ID NO: 188 | VH | QVQLVQSGAEVKKPGSSVKVSCKASGTDFDKTYIHWVRQAPG |
| | | QGLEWMGRISAGSGNVKYNEKFKGRVTITADTSTSTAYMELS |
| | | SLRSEDTAVYYCAGSYYSYDVLDYWGQGTTVTVSS |

A-H.39

| | | |
|---|---|---|
| SEQ ID NO: 189 | VH + VL | QVQLVQSGAEVKKPGSSVKVSCKASGTDFDKIYIHWVRQAPG |
| | | QGLEWMGRISAGSGNIKYNEKFKGRVTITADTSTSTAYMELS |
| | | SLRSEDTAVYYCAGSYYSYDVLDYWGQGTTVTVSSGGGGSGG |
| | | GGSGGGGSGGGGSDIQMTQSPSFLSASVGDRVTITCKASQNV |
| | | DDRVAWYQQKPGKAPKALIYSSSHRYKGVPSRFSGSGSGTEF |
| | | TLTISSLQPEDFATYFCQQFKSYPLTFGQGTKLEIK |
| SEQ ID NO: 190 | VL | DIQMTQSPSFLSASVGDRVTITCKASQNVDDRVAWYQQKPGK |
| | | APKALIYSSSHRYKGVPSRFSGSGSGTEFTLTISSLQPEDFA |
| | | TYFCQQFKSYPLTFGQGTKLEIK |
| SEQ ID NO: 191 | VH | QVQLVQSGAEVKKPGSSVKVSCKASGTDFDKIYIHWVRQAPG |
| | | QGLEWMGRISAGSGNIKYNEKFKGRVTITADTSTSTAYMELS |
| | | SLRSEDTAVYYCAGSYYSYDVLDYWGQGTTVTVSS |

A-H.40

| | | |
|---|---|---|
| SEQ ID NO: 192 | VH + VL | QVQLVQSGAEVKKPGSSVKVSCKASGTDFDKIYIHWVRQAPG |
| | | QGLEWMGRISAGSGNVKYNEKFKGRVTITADTSTSTAYMELS |
| | | SLRSEDTAVYYCAGSYYSYDVLDYWGQGTTVTVSSGGGGSGG |
| | | GGSGGGGSGGGGSDIQMTQSPSFLSASVGDRVTITCKASQNV |
| | | GDRVAWYQQKPGKAPKALIYSSSHRYKGVPSRFSGSGSGTEF |
| | | TLTISSLQPEDFATYFCQQFKSYPLTFGQGTKLEIK |
| SEQ ID NO: 193 | VL | DIQMTQSPSFLSASVGDRVTITCKASQNVGDRVAWYQQKPGK |
| | | APKALIYSSSHRYKGVPSRFSGSGSGTEFTLTISSLQPEDFA |
| | | TYFCQQFKSYPLTFGQGTKLEIK |
| SEQ ID NO: 194 | VH | QVQLVQSGAEVKKPGSSVKVSCKASGTDFDKIYIHWVRQAPG |
| | | QGLEWMGRISAGSGNVKYNEKFKGRVTITADTSTSTAYMELS |
| | | SLRSEDTAVYYCAGSYYSYDVLDYWGQGTTVTVSS |

A-H.41

| | | |
|---|---|---|
| SEQ ID NO: 195 | VH + VL | QVQLVQSGAEVKKPGSSVKVSCKASGGTFKLTYIHWVRQAPG |
| | | QGLEWMGRVSAGSGNVKYNEKFKGRVTITADTSTSTAYMELS |
| | | SLRSEDTAVYYCAGSYYSYDVLDYWGQGTTVTVSSGGGGSGG |
| | | GGSGGGGSGGGGSDIQMTQSPSFLSASVGDRVTITCKASQNV |
| | | DDRVAWYQQKPGKAPKALIYSSSHRYKGVPSRFSGSGSGTEF |
| | | TLTISSLQPEDFATYFCQQFKSYPLTFGQGTKLEIK |
| SEQ ID NO: 196 | VL | DIQMTQSPSFLSASVGDRVTITCKASQNVDDRVAWYQQKPGK |
| | | APKALIYSSSHRYKGVPSRFSGSGSGTEFTLTISSLQPEDFA |
| | | TYFCQQFKSYPLTFGQGTKLEIK |
| SEQ ID NO: 197 | VH | QVQLVQSGAEVKKPGSSVKVSCKASGGTFKLTYIHWVRQAPG |
| | | QGLEWMGRVSAGSGNVKYNEKFKGRVTITADTSTSTAYMELS |
| | | SLRSEDTAVYYCAGSYYSYDVLDYWGQGTTVTVSS |

A-H.42

| | | |
|---|---|---|
| SEQ ID NO: 198 | VH + VL | QVQLVQSGAEVKKPGSSVKVSCKASGTDFKLTYIHWVRQAPG |
| | | QGLEWMGRISPGSGNVKYNEKFKGRVTITADTSTSTAYMELS |
| | | SLRSEDTAVYYCAGSYYSYDVLDYWGQGTTVTVSSGGGGSGG |
| | | GGSGGGGSGGGGSDIQMTQSPSFLSASVGDRVTITCKASQNV |
| | | DNRVAWHQQKPGKAPKALIYSSSHRYKGVPSRFSGSGSGTEF |
| | | TLTISSLQPEDFATYFCQQFKSYPLTFGQGTKLEIK |
| SEQ ID NO: 199 | VL | DIQMTQSPSFLSASVGDRVTITCKASQNVDNRVAWHQQKPGK |
| | | APKALIYSSSHRYKGVPSRFSGSGSGTEFTLTISSLQPEDFA |
| | | TYFCQQFKSYPLTFGQGTKLEIK |
| SEQ ID NO: 200 | VH | QVQLVQSGAEVKKPGSSVKVSCKASGTDFKLTYIHWVRQAPG |
| | | QGLEWMGRISPGSGNVKYNEKFKGRVTITADTSTSTAYMELS |
| | | SLRSEDTAVYYCAGSYYSYDVLDYWGQGTTVTVSS |

A-H.43

| | | |
|---|---|---|
| SEQ ID NO: 201 | VH + VL | QVQLVQSGAEVKKPGSSVKVSCKASGHDFDKFYIHWVRQAPG |
| | | QGLEWMGRVSAGSGNTKYNEKFKGRVTITADTSTSTAYMELS |
| | | SLRSEDTAVYYCAGSYYSYDVLDYWGQGTTVTVSSGGGGSGG |
| | | GGSGGGGSGGGGSDIQMTQSPSFLSASVGDRVTITCKASQNV |
| | | DNRVAWYQQKPGKAPKALIYSSSHRYKGVPSRFSGSGSGTEF |
| | | TLTISSLQPEDFATYFCQQFKSYPLTFGQGTKLEIK |
| SEQ ID NO: 202 | VL | DIQMTQSPSFLSASVGDRVTITCKASQNVDNRVAWYQQKPGK |
| | | APKALIYSSSHRYKGVPSRFSGSGSGTEFTLTISSLQPEDFA |
| | | TYFCQQFKSYPLTFGQGTKLEIK |
| SEQ ID NO: 203 | VH | QVQLVQSGAEVKKPGSSVKVSCKASGHDFDKFYIHWVRQAPG |
| | | QGLEWMGRVSAGSGNTKYNEKFKGRVTITADTSTSTAYMELS |
| | | SLRSEDTAVYYCAGSYYSYDVLDYWGQGTTVTVSS |

A-H.44

| | | |
|---|---|---|
| SEQ ID NO: 204 | VH + VL | QVQLVQSGAEVKKPGSSVKVSCKASGTDFDKFYIHWVRQAPG |
| | | QGLEWMGRVSAGSGNVKYNEKFKGRVTITADTSTSTAYMELS |
| | | SLRSEDTAVYYCAGSYYSYDVLDYWGQGTTVTVSSGGGGSGG |
| | | GGSGGGGSGGGGSDIQMTQSPSFLSASVGDRVTITCKASQNV |
| | | GDRVVWYQQKPGKAPKALIYSSSHRYKGVPSRFSGSGSGTEF |
| | | TLTISSLQPEDFATYFCQQFKSYPLTFGQGTKLEIK |
| SEQ ID NO: 205 | VH | QVQLVQSGAEVKKPGSSVKVSCKASGTDFDKFYIHWVRQAPG |
| | | QGLEWMGRVSAGSGNVKYNEKFKGRVTITADTSTSTAYMELS |
| | | SLRSEDTAVYYCAGSYYSYDVLDYWGQGTTVTVSS |

A-H.45

| | | |
|---|---|---|
| SEQ ID NO: 206 | VH + VL | QVQLVQSGAEVKKPGSSVKVSCKASGYSFTTYYIHWVRQAPG |
| | | QGLEWMGWFSAGSGNTKYNEKFKGRVTITADTSTSTAYMELS |
| | | SLRSEDTAVYYCAVSYYSYDVLDYWGQGTTVTVSSGGGGSGG |
| | | GGSGGGGSGGGGSDIQMTQSPSFLSASVGDRVTITCKASQNV |
| | | GINVVWHQQKPGKAPKALIYSSSHRYSGVPSRFSGSGSGTEF |
| | | TLTISSLQPEDFATYFCQQFKSYPLTFGQGTKLEIK |
| SEQ ID NO: 207 | VH | QVQLVQSGAEVKKPGSSVKVSCKASGYSFTTYYIHWVRQAPG |
| | | QGLEWMGWFSAGSGNTKYNEKFKGRVTITADTSTSTAYMELS |
| | | SLRSEDTAVYYCAVSYYSYDVLDYWGQGTTVTVSS |

A-H.46

| | | |
|---|---|---|
| SEQ ID NO: 208 | VH + VL | QVQLVQSGAEVKKPGSSVKVSCKASGYSFTTYYIHWVRQAPG |
| | | QGLEWMGWFSAGSGNTKYNEKFKGRVTITADTSTSTAYMELS |
| | | SLRSEDTAVYYCAGSYYSYDVLDYWGQGTTVTVSSGGGGSGG |
| | | GGSGGGGSGGGGSDIQMTQSPSFLSASVGDRVTITCKASQNV |
| | | GINVVWHQQKPGKAPKALIYSSSHRYSGVPSRFSGSGSGTEF |
| | | TLTISSLQPEDFATYFCQQFKSYPLTFGQGTKLEIK |
| SEQ ID NO: 209 | VH | QVQLVQSGAEVKKPGSSVKVSCKASGYSFTTYYIHWVRQAPG |
| | | QGLEWMGWFSAGSGNTKYNEKFKGRVTITADTSTSTAYMELS |
| | | SLRSEDTAVYYCAGSYYSYDVLDYWGQGTTVTVSS |

A-H.47

| | | |
|---|---|---|
| SEQ ID NO: 210 | VH + VL | QVQLVQSGAEVKKPGSSVKVSCKASGYSFTTYYIHWVRQAPG |
| | | QGLEWMGWFFPGSGNTKYNEKFKGRVTITADTSTSTAYMELS |
| | | SLRSEDTAVYYCAGSYYSYDVLDYWGQGTTVTVSSGGGGSGG |
| | | GGSGGGGSGGGGSDIQMTQSPSFLSASVGDRVTITCKASQNV |
| | | GINVVWHQQKPGKAPKALIYSSSHRYSGVPSRFSGSGSGTEF |
| | | TLTISSLQPEDFATYFCQQFHSYPLTFGQGTKLEIK |
| SEQ ID NO: 211 | VH | QVQLVQSGAEVKKPGSSVKVSCKASGYSFTTYYIHWVRQAPG |
| | | QGLEWMGWFFPGSGNTKYNEKFKGRVTITADTSTSTAYMELS |
| | | SLRSEDTAVYYCAGSYYSYDVLDYWGQGTTVTVSS |

A-H.48

| | | |
|---|---|---|
| SEQ ID NO: 212 | VH + VL | QVQLVQSGAEVKKPGSSVKVSCKASGYSFTTYYIHWVRQAPG |
| | | QGLEWMGWFSPGSGNTKYNEKFKGRVTITADTSTSTAYMELS |
| | | SLRSEDTAVYYCAVSYYSYDVLDYWGQGTTVTVSSGGGGSGG |
| | | GGSGGGGSGGGGSDIQMTQSPSFLSASVGDRVTITCKASQNV |
| | | GINVVWHQQKPGKAPKALIYSSSHRYSGVPSRFSGSGSGTEF |
| | | TLTISSLQPEDFATYFCQQFKSYPLTFGQGTKLEIK |
| SEQ ID NO: 213 | VH | QVQLVQSGAEVKKPGSSVKVSCKASGYSFTTYYIHWVRQAPG |
| | | QGLEWMGWFSPGSGNTKYNEKFKGRVTITADTSTSTAYMELS |
| | | SLRSEDTAVYYCAVSYYSYDVLDYWGQGTTVTVSS |

A-H.49

| | | |
|---|---|---|
| SEQ ID NO: 214 | VH + VL | QVQLVQSGAEVKKPGSSVKVSCKASGYSFTTYYIHWVRQAPG |
| | | QGLEWMGWFSPGSGNTKYNEKFKGRVTITADTSTSTAYMELS |
| | | SLRSEDTAVYYCAGSYYSYDVLDYWGQGTTVTVSSGGGGSGG |
| | | GGSGGGGSGGGGSDIQMTQSPSFLSASVGDRVTITCKASQNV |
| | | GINVVWHQQKPGKAPKALIYSSSHRYSGVPSRFSGSGSGTEF |
| | | TLTISSLQPEDFATYFCQQFKSYPLTFGQGTKLEIK |
| SEQ ID NO: 215 | VH | QVQLVQSGAEVKKPGSSVKVSCKASGYSFTTYYIHWVRQAPG |
| | | QGLEWMGWFSPGSGNTKYNEKFKGRVTITADTSTSTAYMELS |
| | | SLRSEDTAVYYCAGSYYSYDVLDYWGQGTTVTVSS |

A-H.50

| | | |
|---|---|---|
| SEQ ID NO: 216 | VH + VL | QVQLVQSGAEVKKPGSSVKVSCKASGYSFTTYYIHWVRQAPG |
| | | QGLEWMGRIFPGSGNIKYNEKFKGRVTITADTSTSTAYMELS |
| | | SLRSEDTAVYYCAGSYYSYDVLDYWGQGTTVTVSSGGGGSGG |
| | | GGSGGGGSGGGGSDIQMTQSPSFLSASVGDRVTITCKASQNV |
| | | GINVVWHQQKPGKAPKALIYSSSHRYSGVPSRFSGSGSGTEF |
| | | TLTISSLQPEDFATYFCQQFKSYPLTFGQGTKLEIK |
| SEQ ID NO: 217 | VH | QVQLVQSGAEVKKPGSSVKVSCKASGYSFTTYYIHWVRQAPG |
| | | QGLEWMGRIFPGSGNIKYNEKFKGRVTITADTSTSTAYMELS |
| | | SLRSEDTAVYYCAGSYYSYDVLDYWGQGTTVTVSS |

A-H.51

| | | |
|---|---|---|
| SEQ ID NO: 218 | VH + VL | QVQLVQSGAEVKKPGSSVKVSCKASGYSFTTYYIHWVRQAPG |
| | | QGLEWMGWFFPGSGNIKYNEKFKGRVTITADTSTSTAYMELS |
| | | SLRSEDTAVYYCAGSIYSAGVLDYWGQGTTVTVSSGGGGSGG |
| | | GGSGGGGSGGGGSDIQMTQSPSFLSASVGDRVTITCKASQNV |
| | | GINVVWHQQKPGKAPKALIYSSSHRYSGVPSRFSGSGSGTEF |
| | | TLTISSLQPEDFATYFCQQFKSYPLTFGQGTKLEIK |
| SEQ ID NO: 219 | VH | QVQLVQSGAEVKKPGSSVKVSCKASGYSFTTYYIHWVRQAPG |
| | | QGLEWMGWFFPGSGNIKYNEKFKGRVTITADTSTSTAYMELS |
| | | SLRSEDTAVYYCAGSIYSAGVLDYWGQGTTVTVSS |

A-H.52

| | | |
|---|---|---|
| SEQ ID NO: 220 | VH + VL | QVQLVQSGAEVKKPGSSVKVSCKASGYSFTLGYIHWVRQAPG |
| | | QGLEWMGWFFPGSGNIKYNEKFKGRVTITADTSTSTAYMELS |
| | | SLRSEDTAVYYCAGSYYSYDVLDYWGQGTTVTVSSGGGGSGG |
| | | GGSGGGGSGGGGSDIQMTQSPSFLSASVGDRVTITCKASQNV |
| | | GINVVWHQQKPGKAPKALIYSSSHRYSGVPSRFSGSGSGTEF |
| | | TLTISSLQPEDFATYFCQQFKSYPLTFGQGTKLEIK |
| SEQ ID NO: 221 | VH | QVQLVQSGAEVKKPGSSVKVSCKASGYSFTLGYIHWVRQAPG |
| | | QGLEWMGWFFPGSGNIKYNEKFKGRVTITADTSTSTAYMELS |
| | | SLRSEDTAVYYCAGSYYSYDVLDYWGQGTTVTVSS |

A.H.53

| | | |
|---|---|---|
| SEQ ID NO: 222 | VH + VL | QVQLVQSGAEVKKPGSSVKVSCKASGYSFRLTYIHWVRQAPG |
| | | QGLEWMGWFFPGSGNIKYNEKFKGRVTITADTSTSTAYMELS |
| | | SLRSEDTAVYYCAGSYYSYDVLDYWGQGTTVTVSSGGGGSGG |
| | | GGSGGGGSGGGGSDIQMTQSPSFLSASVGDRVTITCKASQNV |
| | | GINVVWHQQKPGKAPKALIYSSSHRYSGVPSRFSGSGSGTEF |
| | | TLTISSLQPEDFATYFCQQFKSYPLTFGQGTKLEIK |
| SEQ ID NO: 223 | VH | QVQLVQSGAEVKKPGSSVKVSCKASGYSFRLTYIHWVRQAPG |
| | | QGLEWMGWFFPGSGNIKYNEKFKGRVTITADTSTSTAYMELS |
| | | SLRSEDTAVYYCAGSYYSYDVLDYWGQGTTVTVSS |

A-H.54

| | | |
|---|---|---|
| SEQ ID NO: 224 | VH + VL | QVQLVQSGAEVKKPGSSVKVSCKASGYSFHNWYIHWVRQAPG |
| | | QGLEWMGWFFPGSGNIKYNEKFKGRVTITADTSTSTAYMELS |
| | | SLRSEDTAVYYCAGSYYSYDVLDYWGQGTTVTVSSGGGGSGG |
| | | GGSGGGGSGGGGSDIQMTQSPSFLSASVGDRVTITCKASQNV |
| | | GINVVWHQQKPGKAPKALIYSSSHRYSGVPSRFSGSGSGTEF |
| | | TLTISSLQPEDFATYFCQQFKSYPLTFGQGTKLEIK |
| SEQ ID NO: 225 | VH | QVQLVQSGAEVKKPGSSVKVSCKASGYSFHNWYIHWVRQAPG |
| | | QGLEWMGWFFPGSGNIKYNEKFKGRVTITADTSTSTAYMELS |
| | | SLRSEDTAVYYCAGSYYSYDVLDYWGQGTTVTVSS |

A-H.55 antibody

| | | |
|---|---|---|
| SEQ ID NO: 3 | HC CDR1 | GYSFTTYYIH |
| | (Combined) | |
| SEQ ID NO: 4 | HC CDR2 | WFFPGSGNIKYNEKFKG |
| | (Combined) | |
| SEQ ID NO: 5 | HC CDR3 | SYYSYDVLDY |
| | (Combined) | |
| SEQ ID NO: 45 | HC CDR1 (Kabat) | TYYIH |
| SEQ ID NO: 46 | HC CDR2 (Kabat) | WFFPGSGNIKYNEKFKG |
| SEQ ID NO: 47 | HC CDR3 (Kabat) | SYYSYDVLDY |
| SEQ ID NO: 48 | HC CDR1 (Chothia) | GYSFTTY |
| SEQ ID NO: 49 | HC CDR2 (Chothia) | FPGSGN |
| SEQ ID NO: 50 | HC CDR3 (Chothia) | SYYSYDVLDY |
| SEQ ID NO: 1100 | VH | QVQLVQSGAEVKKPGSSVKVSCKASGYSFTTYYIHWVRQAPG |
| | | QGLEWMGWFFPGSGNIKYNEKFKGRVTITADTSTSTAYMELS |
| | | SLRSEDTAVYYCAGSYYSYDVLDYWGQGTTVTVSS |
| SEQ ID NO: 6 | LC CDR1 (Combined) | KASQNVGINVV |
| SEQ ID NO: 7 | LC CDR2 (Combined) | SSSHRYS |
| SEQ ID NO: 8 | LC CDR3 (Combined) | QQFKSYPLT |
| SEQ ID NO: 51 | LC CDR1 (Kabat) | KASQNVGINVV |
| SEQ ID NO: 52 | LC CDR2 (Kabat) | SSSHRYS |
| SEQ ID NO: 53 | LC CDR3 (Kabat) | QQFKSYPLT |
| SEQ ID NO: 54 | LC CDR1 (Chothia) | KASQNVGINVV |
| SEQ ID NO: 55 | LC CDR2 (chothia) | SSSHRYS |
| SEQ ID NO: 56 | LC CDR3 (chothia) | QQFKSYPLT |
| SEQ ID NO: 1101 | VL | QSVLTQPPSVSEAPRQRVTISCKASQNVGINVVWHQQLPGKA |
| | | PKALIYSSSHRYSGVSDRFSGSGSGTSFSLAISGLQSEDEAD |
| | | YFCQQFKSYPLTFGTGTKVTVL |

A-H.56

| | | |
|---|---|---|
| SEQ ID NO: 1309 | VH + VL (ScFv) | QVQLVQSGAEVKKPGSSVKVSCKASGHDFDKFYIHWVRQAPG |
| | | QGLEWMGRVSAGSGNVKYNEKFKGRVTITADTSTSTAYMELS |
| | | SLRSEDTAVYYCAGSYYSYDVLDYWGQGTTVTVSSGGGGSGG |
| | | GGSGGGGSGGGGSDIQMTQSPSFLSASVGDRVTITCKASQNV |
| | | GNRVAWYQQKPGKAPKALIYSSSHRYKGVPSRFSGSGSGTEF |
| | | TLTISSLQPEDFATYFCQQFKSYPLTFGQGTKLEIK |

A-H.57

| | | |
|---|---|---|
| SEQ ID NO: 1326 | VH + VL (ScFv) | QVQLVQSGAEVKKPGSSVKVSCKASGHDFRLTYIHWVRQAPG |
| | | QGLEWMGRVSAGSGNTKYNEKFKGRVTITADTSTSTAYMELS |
| | | SLRSEDTAVYYCAVSYYSYDVLDYWGQGTTVTVSSGGGGSGG |
| | | GGSGGGGSGGGGSDIQMTQSPSFLSASVGDRVTITCKASQNV |
| | | GDRVVWHQQKPGKAPKALIYSSSHRYKGVPSRFSGSGSGTEF |
| | | TLTISSLQPEDFATYFCQQFKSYPLTFGQGTKLEIK |

A-H.58

| | | |
|---|---|---|
| SEQ ID NO: 1327 | VH + VL (ScFv) | QVQLVQSGAEVKKPGSSVKVSCKASGHDFRLTYIHWVRQAPG |
| | | QGLEWMGRVSAGSGNVKYNEKFKGRVTITADTSTSTAYMELS |
| | | SLRSEDTAVYYCAVSYYSYDVLDYWGQGTTVTVSSGGGGSGG |
| | | GGSGGGGSGGGGSDIQMTQSPSFLSASVGDRVTITCKASQNV |
| | | GNRVVWHQQKPGKAPKALIYSSSHRYKGVPSRFSGSGSGTEF |
| | | TLTISSLQPEDFATYFCQQFKSYPLTFGQGTKLEIK |

A-H.59

| | | |
|---|---|---|
| SEQ ID NO: 1328 | VH + VL (ScFv) | QVQLVQSGAEVKKPGSSVKVSCKASGHDFRLTYIHWVRQAPG |
| | | QGLEWMGRIYAGSGNVKYNEKFKGRVTITADTSTSTAYMELS |
| | | SLRSEDTAVYYCAVSYYSYDVLDYWGQGTTVTVSSGGGGSGG |
| | | GGSGGGGSGGGGSDIQMTQSPSFLSASVGDRVTITCKASQNV |
| | | ADRVVWHQQKPGKAPKALIYSSSHRYKGVPSRFSGSGSGTEF |
| | | TLTISSLQPEDFATYFCQQFKSYPLTFGQGTKLEIK |

A-H.60

| | | |
|---|---|---|
| SEQ ID NO: 1329 | VH + VL (ScFv) | QVQLVQSGAEVKKPGSSVKVSCKASGHDFKLTYIHWVRQAPG |
| | | QGLEWMGRVSAGSGNTKYNEKFKGRVTITADTSTSTAYMELS |
| | | SLRSEDTAVYYCAVSYYSYDVLDYWGQGTTVTVSSGGGGSGG |
| | | GGSGGGGSGGGGSDIQMTQSPSFLSASVGDRVTITCKASQNV |
| | | GDRVAWHQQKPGKAPKALIYSSSHRYKGVPSRFSGSGSGTEF |
| | | TLTISSLQPEDFATYFCQQFKSYPLTFGQGTKLEIK |

A-H.61

| | | |
|---|---|---|
| SEQ ID NO: 1330 | VH + VL (ScFv) | QVQLVQSGAEVKKPGSSVKVSCKASGHDFKLTYIHWVRQAPG |
| | | QGLEWMGRVSAGSGNTKYNEKFKGRVTITADTSTSTAYMELS |
| | | SLRSEDTAVYYCAVSYYSYDVLDYWGQGTTVTVSSGGGGSGG |
| | | GGSGGGGSGGGGSDIQMTQSPSFLSASVGDRVTITCKASQNV |
| | | DNRVAWHQQKPGKAPKALIYSSSHRYKGVPSRFSGSGSGTEF |
| | | TLTISSLQPEDFATYFCQQFKSYPLTFGQGTKLEIK |

A-H.62

| | | |
|---|---|---|
| SEQ ID NO: 1331 | VH + VL (ScFv) | QVQLVQSGAEVKKPGSSVKVSCKASGHDFRLTYIHWVRQAPG |
| | | QGLEWMGRVSAGSGNVKYNEKFKGRVTITADTSTSTAYMELS |
| | | SLRSEDTAVYYCAVSYYSYDVLDYWGQGTTVTVSSGGGGSGG |
| | | GGSGGGGSGGGGSDIQMTQSPSFLSASVGDRVTITCKASQNV |
| | | ADRVVWHQQKPGKAPKALIYSSSHRYKGVPSRFSGSGSGTEF |
| | | TLTISSLQPEDFATYFCQQFKSYPLTFGQGTKLEIK |

A-H.63

| | | |
|---|---|---|
| SEQ ID NO: 1332 | VH + VL (ScFv) | QVQLVQSGAEVKKPGSSVKVSCKASGHDFRLTYIHWVRQAPG |
| | | QGLEWMGRVYAGSGNTKYNEKFKGRVTITADTSTSTAYMELS |
| | | SLRSEDTAVYYCAVSYYSYDVLDYWGQGTTVTVSSGGGGSGG |
| | | GGSGGGGSGGGGSDIQMTQSPSFLSASVGDRVTITCKASQNV |
| | | EDRVVWHQQKPGKAPKALIYSSSHRYKGVPSRFSGSGSGTEF |
| | | TLTISSLQPEDFATYFCQQFKSYPLTFGQGTKLEIK |

A-H.64

| | | |
|---|---|---|
| SEQ ID NO: 1333 | VH + VL (ScFv) | QVQLVQSGAEVKKPGSSVKVSCKASGHDFKLTYIHWVRQAPG |
| | | QGLEWMGRVSAGSGNTKYNEKFKGRVTITADTSTSTAYMELS |
| | | SLRSEDTAVYYCAVSYYSYDVLDYWGQGTTVTVSSGGGGSGG |
| | | GGSGGGGSGGGGSDIQMTQSPSFLSASVGDRVTITCKASQNV |
| | | ADRVVWHQQKPGKAPKALIYSSSHRYKGVPSRFSGSGSGTEF |
| | | TLTISSLQPEDFATYFCQQFKSYPLTFGQGTKLEIK |

A-H.65

| | | |
|---|---|---|
| SEQ ID NO: 1334 | VH + VL (ScFv) | QVQLVQSGAEVKKPGSSVKVSCKASGHDFKLTYIHWVRQAPG |
| | | QGLEWMGRISAGSGNTKYNEKFKGRVTITADTSTSTAYMELS |
| | | SLRSEDTAVYYCAVSYYSYDVLDYWGQGTTVTVSSGGGGSGG |
| | | GGSGGGGSGGGGSDIQMTQSPSFLSASVGDRVTITCKASQNV |
| | | GDRVVWHQQKPGKAPKALIYSSSHRYKGVPSRFSGSGSGTEF |
| | | TLTISSLQPEDFATYFCQQFKSYPLTFGQGTKLEIK |
| A-H.66 | | |
| SEQ ID NO: 1335 | VH + VL (ScFv) | QVQLVQSGAEVKKPGSSVKVSCKASGHDFKLTYIHWVRQAPG |
| | | QGLEWMGRIYAGSGNTKYNEKFKGRVTITADTSTSTAYMELS |
| | | SLRSEDTAVYYCAVSYYSYDVLDYWGQGTTVTVSSGGGGSGG |
| | | GGSGGGGSGGGGSDIQMTQSPSFLSASVGDRVTITCKASQNV |
| | | GDRVVWHQQKPGKAPKALIYSSSHRYKGVPSRFSGSGSGTEF |
| | | TLTISSLQPEDFATYFCQQFKSYPLTFGQGTKLEIK |

A-H.67

| | | |
|---|---|---|
| SEQ ID NO: 1336 | VH + VL (ScFv) | QVQLVQSGAEVKKPGSSVKVSCKASGTDFKLTYIHWVRQAPG |
| | | QGLEWMGRIFPGSGNVKYNEKFKGRVTITADTSTSTAYMELS |
| | | SLRSEDTAVYYCAVSYYSYDVLDYWGQGTTVTVSSGGGGSGG |
| | | GGSGGGGSGGGGSDIQMTQSPSFLSASVGDRVTITCKASQNV |
| | | DNRVAWYQQKPGKAPKALIYSSSHRYKGVPSRFSGSGSGTEF |
| | | TLTISSLQPEDFATYFCQQFKSYPLTFGQGTKLEIK |

A-H.68

| | | |
|---|---|---|
| SEQ ID NO: 1337 | VH + VL (ScFv) | QVQLVQSGAEVKKPGSSVKVSCKASGHDFRLTYIHWVRQAPG |
| | | QGLEWMGRISAGSGNVKYNEKFKGRVTITADTSTSTAYMELS |
| | | SLRSEDTAVYYCAVSYYSYDVLDYWGQGTTVTVSSGGGGSGG |
| | | GGSGGGGSGGGGSDIQMTQSPSFLSASVGDRVTITCKASQNV |
| | | ADRVAWYQQKPGKAPKALIYSSSHRYKGVPSRFSGSGSGTEF |
| | | TLTISSLQPEDFATYFCQQFKSYPLTFGQGTKLEIK |

A-H.69

| | | |
|---|---|---|
| SEQ ID NO: 1344 | VH + VL (ScFv) | QVQLVQSGAEVKKPGSSVKVSCKASGTDFKLTYIHWVRQAPG |
| | | QGLEWMGRIFPGSGNVKYNEKFKGRVTITADTSTSTAYMELS |
| | | SLRSEDTAVYYCAGSYYSYDVLDYWGQGTTVTVSSGGGGSGG |
| | | GGSGGGGSGGGGSDIQMTQSPSFLSASVGDRVTITCKASQNV |
| | | DNRVAWYQQKPGKAPKALIYSSSHRYKGVPSRFSGSGSGTEF |
| | | TLTISSLQPEDFATYFCQQFKSYPLTFGQGTKLEIK |

A-H humanized-matured VH

| | | |
|---|---|---|
| SEQ ID NO: 1310 | VH-humanized | QVQLVQSGAEVKKPGSSVKVSCKASGTDFKLTYIHWVRQAPG |
| | matured 1 | QGLEWMGRIFPGSGNVKYNEKFKGRVTITADTSTSTAYMELS |
| | | SLRSEDTAVYYCAGSYYSYDVLDYWGQGTTVTVSS |
| SEQ ID NO: 1311 | VH-humanized | QVQLVQSGAEVKKPGSSVKVSCKASGTDFKLTYIHWVRQAPG |
| | matured 2 | QGLEWMGRIFPGSGNVKYNEKFKGRVTITADTSTSTAYMELS |
| | | SLRSEDTAVYYCAVSYYSYDVLDYWGQGTTVTVSS |
| SEQ ID NO: 1312 | VH-humanized | QVQLVQSGAEVKKPGSSVKVSCKASGHDFRLTYIHWVRQAPG |
| | matured 3 | QGLEWMGRISAGSGNVKYNEKFKGRVTITADTSTSTAYMELS |
| | | SLRSEDTAVYYCAVSYYSYDVLDYWGQGTTVTVSS |

A-H humanized-matured VL

| | | |
|---|---|---|
| SEQ ID NO: 1313 | VL-humanized | DIQMTQSPSFLSASVGDRVTITCKASQNVDNRVAWYQQKPGK |
| | matured 1 | APKALIYSSSHRYKGVPSRFSGSGSGTEFTLTISSLQPEDFA |
| | | TYFCQQFKSYPLTFGQGTKLEIK |
| SEQ ID NO: 1314 | VL-humanized | DIQMTQSPSFLSASVGDRVTITCKASQNVADRVAWYQQKPGK |
| | matured 2 | APKALIYSSSHRYKGVPSRFSGSGSGTEFTLTISSLQPEDFA |
| | | TYFCQQFKSYPLTFGQGTKLEIK |

[0717] In some embodiments, the anti-TCRβV antibody molecule, e.g., anti-TCRβV6 (e.g., anti-TCRβ V6-5*01) antibody molecule comprises a VH and/or a VL of an antibody described in Table 3, or a sequence with at least 80%, 85%, 90%, 95%, 96%, 97%, 98%, 99% or more identity thereto.

[0718] In some embodiments, the anti-TCRβV antibody molecule, e.g., anti-TCRβV6 (e.g., anti-TCRβ V6-5*01) antibody molecule comprises a VH and a VL of an antibody described in Table 3, or a sequence with at least 80%, 85%, 90%, 95%, 96%, 97%, 98%, 99% or more identity thereto.

[0719] In some embodiments, an anti-TCRβV antibody disclosed herein has an antigen binding domain having a VL having a consensus sequence of SEQ ID NO: 230, wherein position 30 is G, E, A or D; position 31 is N or D; position 32 is R or K; position 36 is Y or H; and/or position 56 is K or S.

[0720] In some embodiments, an anti-TCRVb antibody disclosed herein has an antigen binding domain having a VH having a consensus sequence of SEQ ID NO: 231, wherein: position 27 is H or T or G or Y; position 28 is D or T or S; position 30 is H or R or D or K or T; position 31 is L or D or K or T or N; position 32 is W or F or T or I or Y or G; position 49 is R or W; position 50 is V or I or F; position 51 is F or S or Y; position 52 is A or P; position 56 is N or S; position 57 is T or V or Y or I; position 58 is K or R; position 97 is G or V; position 99 is Y or I; position 102 is Y or A; and/or position 103 is D or G.

### Anti-TCRβV12 Antibodies

[0721] Accordingly, in one aspect, the disclosure provides an anti-TCRβV antibody molecule that binds to human TCRβ V12, e.g., a TCRβ V12 subfamily comprising: TCRβ V12-4*01, TCRβ V12-3*01 or TCRβ V12-5*01. In some embodiments the TCRβ V12 subfamily comprises TCRβ V12-4*01. In some embodiments the TCRβ V12 subfamily comprises TCRβ V12-3*01.

[0722] In some embodiments, the anti-TCRβV antibody molecule, e.g., anti-TCRβV12 antibody molecule, is a non-murine antibody molecule, e.g., a human or humanized antibody molecule. In some embodiments, the anti-TCRβV antibody molecule, e.g., anti-TCRβV12 antibody molecule is a human antibody molecule. In some embodiments, the anti-TCRβV antibody molecule, e.g., anti-TCRβV12 antibody molecule is a humanized antibody molecule.

[0723] In some embodiments, the anti-TCRβV antibody molecule, e.g., anti-TCRβV12 antibody molecule, is isolated or recombinant.

[0724] In some embodiments, the anti-TCRβV antibody molecule, e.g., anti-TCRβV12 antibody molecule, comprises at least one antigen-binding region, e.g., a variable region or an antigen-binding fragment thereof, from an antibody described herein, e.g., an antibody described in Table 4, or encoded by a nucleotide sequence in Table 4, or a sequence substantially identical (e.g., at least 80%, 85%, 90%, 92%, 95%, 97%, 98%, 99% or higher identical) to any of the aforesaid sequences.

[0725] In some embodiments, the anti-TCRβV antibody molecule, e.g., anti-TCRβV12 antibody molecule, comprises at least one, two, three or four variable regions from an antibody described herein, e.g., an antibody as described in Table 4, or encoded by a nucleotide sequence in Table 4, or a sequence substantially identical (e.g., at least 80%, 85%, 90%, 92%, 95%, 97%, 98%, 99% or higher identical) to any of the aforesaid sequences.

[0726] In some embodiments, the anti-TCRβV antibody molecule, e.g., anti-TCRβV12 antibody molecule, comprises at least one or two heavy chain variable regions from an antibody described herein, e.g., an antibody as described in Table 4, or encoded by a nucleotide sequence in Table 4, or a sequence substantially identical (e.g., at least 80%, 85%, 90%, 92%, 95%, 97%, 98%, 99% or higher identical) to any of the aforesaid sequences.

[0727] In some embodiments, the anti-TCRβV antibody molecule, e.g., anti-TCRβV12 antibody molecule, comprises at least one or two light chain variable regions from an antibody described herein, e.g., an antibody as described in Table 4, or encoded by a nucleotide sequence in Table 4, or a sequence substantially identical (e.g., at least 80%, 85%, 90%, 92%, 95%, 97%, 98%, 99% or higher identical) to any of the aforesaid sequences.

[0728] In some embodiments, the anti-TCRβV antibody molecule, e.g., anti-TCRβV12 antibody molecule, comprises a heavy chain constant region for an IgG4, e.g., a human IgG4. In still another embodiment, the anti-TCRβV antibody molecule, e.g., anti-TCRβV12 antibody molecule, includes a heavy chain constant region for an IgG1, e.g., a human IgG1. In one embodiment, the heavy chain constant region comprises an amino sequence set forth in Table 5, or a sequence substantially identical (e.g., at least 80%, 85%, 90%, 92%, 95%, 97%, 98%, 99% or higher identical) thereto.

[0729] In some embodiments, the anti-TCRβV antibody molecule, e.g., anti-TCRβV12 antibody molecule, includes a kappa light chain constant region, e.g., a human kappa light chain constant region. In one embodiment, the light chain constant region comprises an amino sequence set forth in Table 5, or a sequence substantially identical (e.g., at least 80%, 85%, 90%, 92%, 95%, 97%, 98%, 99% or higher identical) thereto.

[0730] In some embodiments, the anti-TCRβV antibody molecule, e.g., anti-TCRβV12 antibody molecule, includes at least one, two, or three complementarity determining regions (CDRs) from a heavy chain variable region of an antibody described herein, e.g., an antibody as described in Table 4, or encoded by the nucleotide sequence in Table 4, or a sequence substantially identical (e.g., at least 80%, 85%, 90%, 92%, 95%, 97%, 98%, 99% or higher identical) to any of the aforesaid sequences.

[0731] In some embodiments, the anti-TCRβV antibody molecule, e.g., anti-TCRβV12 antibody molecule, includes at least one, two, or three CDRs (or collectively all of the CDRs) from a heavy chain variable region comprising an amino acid sequence shown in Table 4, or encoded by a nucleotide sequence shown in Table 4. In one embodiment, one or more of the CDRs (or collectively all of the CDRs) have one, two, three, four, five, six or more changes, e.g., amino acid substitutions or deletions, relative to the amino acid sequence shown in Table 4, or encoded by a nucleotide sequence shown in Table 4.

[0732] In some embodiments, the anti-TCRβV antibody molecule, e.g., anti-TCRβV12 antibody molecule, includes at least one, two, or three complementarity determining regions (CDRs) from a light chain variable region of an antibody described herein, e.g., an antibody as described in Table 4, or encoded by the nucleotide sequence in Table 4, or a sequence substantially identical (e.g., at least 80%, 85%, 90%, 92%, 95%, 97%, 98%, 99% or higher identical) to any of the aforesaid sequences.

[0733] In some embodiments, the anti-TCRβV antibody molecule, e.g., anti-TCRβV12 antibody molecule, includes at least one, two, or three CDRs (or collectively all of the CDRs) from a light chain variable region comprising an amino acid sequence shown in Table 4, or encoded by a nucleotide sequence shown in Table 4. In one embodiment, one or more of the CDRs (or collectively all of the CDRs) have one, two, three, four, five, six or more changes, e.g., amino acid substitutions or deletions, relative to the amino acid sequence shown in Table 4, or encoded by a nucleotide sequence shown in Table 4.

[0734] In some embodiments, the anti-TCRβV antibody molecule, e.g., anti-TCRβV12 antibody molecule, includes at least one, two, three, four, five or six CDRs (or collectively all of the CDRs) from a heavy and light chain variable region comprising an amino acid sequence shown in Table 4, or encoded by a nucleotide sequence shown in Table 4. In one embodiment, one or more of the CDRs (or collectively all of the CDRs) have one, two, three, four, five, six or more changes, e.g., amino acid substitutions or deletions, relative to the amino acid sequence shown in Table 4, or encoded by a nucleotide sequence shown in Table 4.

[0735] In some embodiments, the anti-TCRβV antibody molecule, e.g., anti-TCRβV12 antibody molecule, molecule includes all six CDRs from an antibody described herein, e.g., an antibody as described in Table 4, or encoded by the nucleotide sequence in Table 4, or closely related CDRs, e.g., CDRs which are identical or which have at least one amino acid alteration, but not more than two, three or four alterations (e.g., substitutions, deletions, or insertions, e.g., conservative substitutions). In some embodiments, the anti-TCRβV antibody molecule, e.g., anti-TCRβV12 antibody molecule, may include any CDR described herein.

[0736] In some embodiments, the anti-TCRβV antibody molecule, e.g., anti-TCRβV12 antibody molecule includes at least one, two, or three CDRs according to Kabat et al. (e.g., at least one, two, or three CDRs according to the Kabat definition as set out in Table 4) from a heavy chain variable region of an antibody described herein, e.g., an antibody chosen as described in Table 4, or a sequence substantially identical (e.g., at least 80%, 85%, 90%, 92%, 95%, 97%, 98%, 99% or higher identical) to any of the aforesaid sequences; or which have at least one amino acid alteration, but not more than two, three or four alterations (e.g., substitutions, deletions, or insertions, e.g., conservative substitutions) relative to one, two, or three CDRs according to Kabat et al. shown in Table 4.

[0737] In some embodiments, the anti-TCRβV antibody molecule, e.g., anti-TCRβV12 antibody molecule includes at least one, two, or three CDRs according to Kabat et al. (e.g., at least one, two, or three CDRs according to the Kabat definition as set out in Table 4) from a light chain variable region of an antibody described herein, e.g., an antibody as described in Table 4, or a sequence substantially identical (e.g., at least 80%, 85%, 90%, 92%, 95%, 97%, 98%, 99% or higher identical) to any of the aforesaid sequences; or which have at least one amino acid alteration, but not more than two, three or four alterations (e.g., substitutions, deletions, or insertions, e.g., conservative substitutions) relative to one, two, or three CDRs according to Kabat et al. shown in Table 4.

[0738] In some embodiments, the anti-TCRβV antibody molecule, e.g., anti-TCRβV12 antibody molecule includes at least one, two, three, four, five, or six CDRs according to Kabat et al. (e.g., at least one, two, three, four, five, or six CDRs according to the Kabat definition as set out in Table 4) from the heavy and light chain variable regions of an antibody described herein, e.g., an antibody as described in Table 4, or encoded by the nucleotide sequence in Table 4; or a sequence substantially identical (e.g., at least 80%, 85%, 90%, 92%, 95%, 97%, 98%, 99% or higher identical) to any of the aforesaid sequences; or which have at least one amino acid alteration, but not more than two, three or four alterations (e.g., substitutions, deletions, or insertions, e.g., conservative substitutions) relative to one, two, three, four, five, or six CDRs according to Kabat et al. shown in Table 4.

[0739] In some embodiments, the anti-TCRβV antibody molecule, e.g., anti-TCRβV12 antibody molecule includes all six CDRs according to Kabat et al. (e.g., all six CDRs according to the Kabat definition as set out in Table 4) from the heavy and light chain variable regions of an antibody described herein, e.g., an antibody as described in Table 4, or encoded by the nucleotide sequence in Table 4; or encoded by the nucleotide sequence in Table 4; or a sequence substantially identical (e.g., at least 80%, 85%, 90%, 92%, 95%, 97%, 98%, 99% or higher identical) to any of the aforesaid sequences; or which have at least one amino acid alteration, but not more than two, three or four alterations (e.g., substitutions, deletions, or insertions, e.g., conservative substitutions) relative to all six CDRs according to Kabat et al. shown in Table 4. In some embodiments, the anti-TCRβV antibody molecule, e.g., anti-TCRβV12 antibody molecule may include any CDR described herein.

[0740] In some embodiments, the anti-TCRβV antibody molecule, e.g., anti-TCRβV12 antibody molecule includes at least one, two, or three hypervariable loops that have the same canonical structures as the corresponding hypervariable loop of an antibody described herein, e.g., an antibody described in Table 4, e.g., the same canonical structures as at least loop 1 and/or loop 2 of the heavy and/or light chain variable domains of an antibody described herein. See, e.g., Chothia et al., (1992) J. Mol. Biol. 227:799-817; Tomlinson et al., (1992) J. Mol. Biol. 227:776-798 for descriptions of hypervariable loop canonical structures. These structures can be determined by inspection of the tables described in these references.

[0741] In some embodiments, the anti-TCRβV antibody molecule, e.g., anti-TCRβV12 antibody molecule includes at least one, two, or three CDRs according to Chothia et al. (e.g., at least one, two, or three CDRs according to the Chothia definition as set out in Table 4) from a heavy chain variable region of an antibody described herein, e.g., an antibody chosen as described in Table 4, or a sequence substantially identical (e.g., at least 80%, 85%, 90%, 92%, 95%, 97%, 98%, 99% or higher identical) to any of the aforesaid sequences; or which have at least one amino acid alteration, but not more than two, three or four alterations (e.g., substitutions, deletions, or insertions, e.g., conservative substitutions) relative to one, two, or three CDRs according to Chothia et al. shown in Table 4.

[0742] In some embodiments, the anti-TCRβV antibody molecule, e.g., anti-TCRβV12 antibody molecule includes at least one, two, or three CDRs according to Chothia et al. (e.g., at least one, two, or three CDRs according to the Chothia definition as set out in Table 4) from a light chain variable region of an antibody described herein, e.g., an antibody as described in Table 4, or a sequence substantially identical (e.g., at least 80%, 85%, 90%, 92%, 95%, 97%, 98%, 99% or higher identical) to any of the aforesaid sequences; or which have at least one amino acid alteration, but not more than two, three or four alterations (e.g., substitutions, deletions, or insertions, e.g., conservative substitutions) relative to one, two, or three CDRs according to Chothia et al. shown in Table 4.

[0743] In some embodiments, the anti-TCRβV antibody molecule, e.g., anti-TCRβV12 antibody molecule includes at least one, two, three, four, five, or six CDRs according to Chothia et al. (e.g., at least one, two, three, four, five, or six CDRs according to the Chothia definition as set out in Table 4) from the heavy and light chain variable regions of an antibody described herein, e.g., an antibody as described in Table 4, or encoded by the nucleotide sequence in Table 4; or a sequence substantially identical (e.g., at least 80%, 85%, 90%, 92%, 95%, 97%, 98%, 99% or higher identical) to any of the aforesaid sequences; or which have at least one amino acid alteration, but not more than two, three or four alterations (e.g., substitutions, deletions, or insertions, e.g., conservative substitutions) relative to one, two, three, four, five, or six CDRs according to Chothia et al. shown in Table 4.

[0744] In some embodiments, the anti-TCRβV antibody molecule, e.g., anti-TCRβV12 antibody molecule includes all six CDRs according to Chothia et al. (e.g., all six CDRs according to the Chothia definition as set out in Table 4) from the heavy and light chain variable regions of an antibody described herein, e.g., an antibody as described in Table 4, or encoded by the nucleotide sequence in Table 4; or encoded by the nucleotide sequence in Table 4; or a sequence substantially identical (e.g., at least 80%, 85%, 90%, 92%, 95%, 97%, 98%, 99% or higher identical) to any of the aforesaid sequences; or which have at least one amino acid alteration, but not more than two, three or four alterations (e.g., substitutions, deletions, or insertions, e.g., conservative substitutions) relative to all six CDRs according to Chothia et al. shown in Table 4. In some embodiments, the anti-TCRβV antibody molecule, e.g., anti-TCRβV12 antibody molecule may include any CDR described herein.

[0745] In some embodiments, the anti-TCRβV antibody molecule, e.g., anti-TCRβV12 antibody molecule includes at least one, two, or three CDRs according to a combined CDR (e.g., at least one, two, or three CDRs according to the combined CDR definition as set out in Table 4) from a heavy chain variable region of an antibody described herein, e.g., an antibody chosen as described in Table 4, or a sequence substantially identical (e.g., at least 80%, 85%, 90%, 92%, 95%, 97%, 98%, 99% or higher identical) to any of the aforesaid sequences; or which have at least one amino acid alteration, but not more than two, three or four alterations (e.g., substitutions, deletions, or insertions, e.g., conservative substitutions) relative to one, two, or three CDRs according to combined CDR shown in Table 4.

[0746] In some embodiments, the anti-TCRβV antibody molecule, e.g., anti-TCRβV12 antibody molecule includes at least one, two, or three CDRs according to a combined CDR (e.g., at least one, two, or three CDRs according to the combined CDR definition as set out in Table 4) from a light chain variable region of an antibody described herein, e.g., an antibody as described in Table 4, or a sequence substantially identical (e.g., at least 80%, 85%, 90%, 92%, 95%, 97%, 98%, 99% or higher identical) to any of the aforesaid sequences; or which have at least one amino acid alteration, but not more than two, three or four alterations (e.g., substitutions, deletions, or insertions, e.g., conservative substitutions) relative to one, two, or three CDRs according to a combined CDR shown in Table 4.

[0747] In some embodiments, the anti-TCRβV antibody molecule, e.g., anti-TCRβV12 antibody molecule includes at least one, two, three, four, five, or six CDRs according to a combined CDR. (e.g., at least one, two, three, four, five, or six CDRs according to the combined CDR definition as set out in Table 4) from the heavy and light chain variable regions of an antibody described herein, e.g., an antibody as described in Table 4, or encoded by the nucleotide sequence in Table 4; or a sequence substantially identical (e.g., at least 80%, 85%, 90%, 92%, 95%, 97%, 98%, 99% or higher identical) to any of the aforesaid sequences; or which have at least one amino acid alteration, but not more than two, three or four alterations (e.g., substitutions, deletions, or insertions, e.g., conservative substitutions) relative to one, two, three, four, five, or six CDRs according to a combined CDR shown in Table 4.

[0748] In some embodiments, the anti-TCRβV antibody molecule, e.g., anti-TCRβV12 antibody molecule includes all six CDRs according to a combined CDR (e.g., all six CDRs according to the combined CDR definition as set out in Table 4) from the heavy and light chain variable regions of an antibody described herein, e.g., an antibody as described in Table 4, or encoded by the nucleotide sequence in Table 4; or encoded by the nucleotide sequence in Table 4; or a sequence substantially identical (e.g., at least 80%, 85%, 90%, 92%, 95%, 97%, 98%, 99% or higher identical) to any of the aforesaid sequences; or which have at least one amino acid alteration, but not more than two, three or four alterations (e.g., substitutions, deletions, or insertions, e.g., conservative substitutions) relative to all six CDRs according to a combined CDR shown in Table 4. In some embodiments, the anti-TCRβV antibody molecule, e.g., anti-TCRβV12 antibody molecule may include any CDR described herein.

[0749] In some embodiments, a combined CDR as set out in Table 3 is a CDR that comprises a Kabat CDR and a Chothia CDR.

[0750] In some embodiments, the anti-TCRβV antibody molecule, e e.g., anti-TCRβV12 antibody molecule, molecule includes a combination of CDRs or hypervariable loops identified as combined CDRs in Table 3. In some embodiments, the anti-TCRβV antibody molecule, e.g., anti-TCRβV12 antibody molecule, can contain any combination of CDRs or hypervariable loops according the “combined” CDRs are described in Table 3.

[0751] In some embodiments, the anti-TCRβV antibody molecule, e.g., anti-TCRβV12 antibody molecule includes a combination of CDRs or hypervariable loops defined according to the Kabat et al. and Chothia et al., or as described in Table 3

[0752] In some embodiments, the anti-TCRβV antibody molecule, e.g., anti-TCRβV12 antibody molecule can contain any combination of CDRs or hypervariable loops according to the Kabat and Chothia definitions.

[0753] In an embodiment, e.g., an embodiment comprising a variable region, a CDR (e.g., a combined CDR, Chothia CDR or Kabat CDR), or other sequence referred to herein, e.g., in Table 4, the antibody molecule is a monospecific antibody molecule, a bispecific antibody molecule, a bivalent antibody molecule, a biparatopic antibody molecule, or an antibody molecule that comprises an antigen binding fragment of an antibody, e.g., a half antibody or antigen binding fragment of a half antibody. In certain embodiments the antibody molecule comprises a multispecific molecule, e.g., a bispecific molecule, e.g., as described herein.

[0754] In some embodiments, the anti-TCRβV antibody molecule, e.g., anti-TCRβV12 antibody molecule includes:
[0755] (i) one, two or all of a light chain complementarity determining region 1 (LC CDR1), a light chain complementarity determining region 2 (LC CDR2), and a light chain complementarity determining region 3 (LC CDR3) of SEQ ID NO: 16, SEQ ID NO: 26, SEQ ID NO: 27, SEQ ID NO: 28, SEQ ID NO: 29 or SEQ ID NO: 30, and/or
[0756] (ii) one, two or all of a heavy chain complementarity determining region 1 (HC CDR1), heavy chain complementarity determining region 2 (HC CDR2), and a heavy chain complementarity determining region 3 (HC CDR3) of SEQ ID NO: 15, SEQ ID NO: 23, SEQ ID NO: 24, or SEQ ID NO: 25.

[0757] In some embodiments, the anti-TCRβV antibody molecule, e.g., anti-TCRβV12 antibody molecule comprises:
[0758] (i) a LC CDR1 amino acid sequence of SEQ ID NO: 20, a LC CDR2 amino acid sequence of SEQ ID NO: 21, or a LC CDR3 amino acid sequence of SEQ ID NO: 22; and/or
[0759] (ii) a HC CDR1 amino acid sequence of SEQ ID NO: 17, a HC CDR2 amino acid sequence of SEQ ID NO: 18, or a HC CDR3 amino acid sequence of SEQ ID NO: 19.

[0760] In some embodiments, the anti-TCRβV antibody molecule, e.g., anti-TCRβV12 antibody molecule comprises:
[0761] (i) a light chain variable region (VL) comprising a LC CDR1 amino acid sequence of SEQ ID NO: 20, a LC CDR2 amino acid sequence of SEQ ID NO: 21, and a LC CDR3 amino acid sequence of SEQ ID NO: 2; and/or
[0762] (ii) a heavy chain variable region (VH) comprising a HC CDR1 amino acid sequence of SEQ ID NO: 17, a HC CDR2 amino acid sequence of SEQ ID NO: 18, and a HC CDR3 amino acid sequence of SEQ ID NO: 19.

[0763] In some embodiments, the anti-TCRβV antibody molecule, e.g., anti-TCRβV12 antibody molecule comprises:
[0764] (i) a LC CDR1 amino acid sequence of SEQ ID NO: 63, a LC CDR2 amino acid sequence of SEQ ID NO: 64, or a LC CDR3 amino acid sequence of SEQ ID NO: 65; and/or
[0765] (ii) a HC CDR1 amino acid sequence of SEQ ID NO: 57, a HC CDR2 amino acid sequence of SEQ ID NO: 58, or a HC CDR3 amino acid sequence of SEQ ID NO: 59.

[0766] In some embodiments, the anti-TCRβV antibody molecule, e.g., anti-TCRβV12 antibody molecule comprises:
[0767] (i) a light chain variable region (VL) comprising a LC CDR1 amino acid sequence of SEQ ID NO: 63, a LC CDR2 amino acid sequence of SEQ ID NO: 64, or a LC CDR3 amino acid sequence of SEQ ID NO: 65; and/or
[0768] (ii) a heavy chain variable region (VH) comprising a HC CDR1 amino acid sequence of SEQ ID NO: 57, a HC CDR2 amino acid sequence of SEQ ID NO: 58, or a HC CDR3 amino acid sequence of SEQ ID NO: 59.

[0769] In some embodiments, the anti-TCRβV antibody molecule, e.g., anti-TCRβV12 antibody molecule comprises:
[0770] (i) a LC CDR1 amino acid sequence of SEQ ID NO: 66, a LC CDR2 amino acid sequence of SEQ ID NO: 67, or a LC CDR3 amino acid sequence of SEQ ID NO: 68; and/or
[0771] (ii) a HC CDR1 amino acid sequence of SEQ ID NO: 60, a HC CDR2 amino acid sequence of SEQ ID NO: 61, or a HC CDR3 amino acid sequence of SEQ ID NO: 62.

[0772] In some embodiments, the anti-TCRβV antibody molecule, e.g., anti-TCRβV12 antibody molecule comprises:
[0773] (i) a light chain variable region (VL) comprising a LC CDR1 amino acid sequence of SEQ ID NO: 63, a LC CDR2 amino acid sequence of SEQ ID NO: 64, or a LC CDR3 amino acid sequence of SEQ ID NO: 65; and/or
[0774] (ii) a heavy chain variable region (VH) comprising a HC CDR1 amino acid sequence of SEQ ID NO: 57, a HC CDR2 amino acid sequence of SEQ ID NO: 58, or a HC CDR3 amino acid sequence of SEQ ID NO: 59.

[0775] In one embodiment, the light or the heavy chain variable framework (e.g., the region encompassing at least FR1, FR2, FR3, and optionally FR4) of the anti-TCRβV antibody molecule, e.g., anti-TCRβV12 antibody molecule can be chosen from: (a) a light or heavy chain variable framework including at least 80%, 85%, 87% 90%, 92%, 93%, 95%, 97%, 98%, or 100% of the amino acid residues from a human light or heavy chain variable framework, e.g., a light or heavy chain variable framework residue from a human mature antibody, a human germline sequence, or a human consensus sequence; (b) a light or heavy chain variable framework including from 20% to 80%, 40% to 60%, 60% to 90%, or 70% to 95% of the amino acid residues from a human light or heavy chain variable framework, e.g., a light or heavy chain variable framework residue from a human mature antibody, a human germline sequence, or a human consensus sequence; (c) a non-human framework (e.g., a rodent framework); or (d) a non-human framework that has been modified, e.g., to remove antigenic or cytotoxic determinants, e.g., deimmunized, or partially humanized. In one embodiment, the light or heavy chain variable framework region (particularly FR1, FR2 and/or FR3) includes a light or heavy chain variable framework sequence at least 70, 75, 80, 85, 87, 88, 90, 92, 94, 95, 96, 97, 98, 99% identical or identical to the frameworks of a VL or VH segment of a human germline gene.

[0776] In some embodiments, the anti-TCRβV antibody molecule, e.g., anti-TCRβV12 antibody molecule, comprises a heavy chain variable domain having at least one, two, three, four, five, six, seven, ten, fifteen, twenty or more changes, e.g., amino acid substitutions or deletions, from an amino acid sequence described in Table 4 .e.g., the amino acid sequence of the FR region in the entire variable region, e.g., shown in FIGS. 2A and 2B, or in SEQ ID NOs: 23-25.

[0777] Alternatively, or in combination with the heavy chain substitutions described herein the anti-TCRβV antibody molecule, e.g., anti-TCRβV12 antibody molecule comprises a light chain variable domain having at least one, two, three, four, five, six, seven, ten, fifteen, twenty or more amino acid changes, e.g., amino acid substitutions or deletions, from an amino acid sequence of an antibody described herein .e.g., the amino acid sequence of the FR region in the entire variable region, e.g., shown in FIGS. 2A and 2B, or in SEQ ID NOs: 26-30.

[0778] In some embodiments, the anti-TCRβV antibody molecule, e.g., anti-TCRβV12 antibody molecule includes one, two, three, or four heavy chain framework regions shown in FIG. 2A, or a sequence substantially identical thereto.

[0779] In some embodiments, the anti-TCRβV antibody molecule, e.g., anti-TCRβV12 antibody molecule includes one, two, three, or four light chain framework regions shown in FIG. 2B, or a sequence substantially identical thereto.

[0780] In some embodiments, the anti-TCRβV antibody molecule, e.g., anti-TCRβV12 antibody molecule comprises the light chain framework region 1 e.g., as shown in FIG. 2B.

[0781] In some embodiments, the anti-TCRβV antibody molecule, e.g., anti-TCRβV12 antibody molecule comprises the light chain framework region 2 e.g., as shown in FIG. 2B.

[0782] In some embodiments, the anti-TCRβV antibody molecule, e.g., anti-TCRβV12 antibody molecule comprises the light chain framework region 3, e.g., as shown in FIG. 2B.

[0783] In some embodiments, the anti-TCRβV antibody molecule, e.g., anti-TCRβV12 antibody molecule comprises the light chain framework region 4, e.g., as shown in FIG. 2B.

[0784] In some embodiments, the anti-TCRβV antibody molecule, e.g., anti-TCRβV12 antibody molecule comprises a light chain comprising a framework region, e.g., framework region 1 (FR1), comprising a change, e.g., a substitution (e.g., a conservative substitution) at one or more, e.g., all, position disclosed herein according to Kabat numbering. In some embodiments, FR1 comprises an Aspartic Acid at position 1, e.g., a substitution at position 1 according to Kabat numbering, e.g., an Alanine to Aspartic Acid substitution. In some embodiments, FR1 comprises an Asparagine at position 2, e.g., a substitution at position 2 according to Kabat numbering, e.g., an Isoleucine to Asparagine substitution, Serine to Asparagine substitution or Tyrosine to Asparagine substitution. In some embodiments, FR1 comprises a Leucine at position 4, e.g., a substitution at position 4 according to Kabat numbering, e.g., a Methionine to Leucine substitution.

[0785] In some embodiments, the anti-TCRβV antibody molecule, e.g., anti-TCRβV12 antibody molecule comprises a light chain comprising a framework region, e.g., framework region 1 (FR1), comprising a substitution at position 1 according to Kabat numbering, e.g., an Alanine to Aspartic Acid substitution, a substitution at position 2 according to Kabat numbering, e.g., an Isoleucine to Asparagine substitution, Serine to Asparagine substitution or Tyrosine to Asparagine substitution, and a substitution at position 4 according to Kabat numbering, e.g., a Methionine to Leucine substitution. In some embodiments, the anti-TCRβV antibody molecule, e.g., anti-TCRβV12 antibody molecule comprises a light chain comprising a framework region, e.g., framework region 1 (FR1), comprising a substitution at position 1 according to Kabat numbering, e.g., an Alanine to Aspartic Acid substitution, and a substitution at position 2 according to Kabat numbering, e.g., an Isoleucine to Asparagine substitution, Serine to Asparagine substitution or Tyrosine to Asparagine substitution. In some embodiments, the anti-TCRβV antibody molecule, e.g., anti-TCRβV12 antibody molecule comprises a light chain comprising a framework region, e.g., framework region 1 (FR1), comprising a substitution at position 1 according to Kabat numbering, e.g., an Alanine to Aspartic Acid substitution, and a substitution at position 4 according to Kabat numbering, e.g., a Methionine to Leucine substitution. In some embodiments, the anti-TCRβV antibody molecule, e.g., anti-TCRβV12 antibody molecule comprises a light chain comprising a framework region, e.g., framework region 1 (FR1), comprising a substitution at position 2 according to Kabat numbering, e.g., an Isoleucine to Asparagine substitution, Serine to Asparagine substitution or Tyrosine to Asparagine substitution, and a substitution at position 4 according to Kabat numbering, e.g., a Methionine to Leucine substitution. In some embodiments, the substitution is relative to a human germline light chain framework region sequence.

[0786] In some embodiments, the anti-TCRβV antibody molecule, e.g., anti-TCRβV12 antibody molecule comprises a light chain comprising a framework region, e.g., framework region 3 (FR3), comprising a change, e.g., a substitution (e.g., a conservative substitution) at one or more, e.g., all, position disclosed herein according to Kabat numbering. In some embodiments, FR3 comprises a Glycine at position 66, e.g., a substitution at position 66 according to Kabat numbering, e.g., a Lysine to Glycine substitution, or a Serine to Glycine substitution. In some embodiments, FR3 comprises an Asparagine at position 69, e.g., a substitution at position 69 according to Kabat numbering, e.g., a Tyrosine to Asparagine substitution. In some embodiments, FR3 comprises a Tyrosine at position 71, e.g., a substitution at position 71 according to Kabat numbering, e.g., a Phenylalanine to Tyrosine substitution, or an Alanine to Tyrosine substitution.

[0787] In some embodiments, the anti-TCRβV antibody molecule, e.g., anti-TCRβV12 antibody molecule comprises a light chain comprising a framework region, e.g., framework region 3 (FR3), comprising a substitution at position 66 according to Kabat numbering, e.g., a Lysine to Glycine substitution, or a Serine to Glycine substitution, and a substitution at position 69 according to Kabat numbering, e.g., a Tyrosine to Asparagine substitution. . In some embodiments, the anti-TCRβV antibody molecule, e.g., anti-TCRβV12 antibody molecule comprises a light chain comprising a framework region, e.g., framework region 3 (FR3), comprising a substitution at position 66 according to Kabat numbering, e.g., Lysine to Glycine substitution, or a Serine to Glycine substitution, and a substitution at position 71 according to Kabat numbering, e.g., a Phenylalanine to Tyrosine substitution, or an Alanine to Tyrosine substitution. In some embodiments, the anti-TCRβV antibody molecule, e.g., anti-TCRβV12 antibody molecule comprises a light chain comprising a framework region, e.g., framework region 3 (FR3), comprising a substitution at position 69 according to Kabat numbering, e.g., a Tyrosine to Asparagine substitution and a substitution at position 71 according to Kabat numbering, e.g., a Phenylalanine to Tyrosine substitution, or an Alanine to Tyrosine substitution. In some embodiments, the anti-TCRβV antibody molecule, e.g., anti-TCRβV12 antibody molecule comprises a light chain comprising a framework region, e.g., framework region 3 (FR3), comprising a substitution at position 66 according to Kabat numbering, e.g., a Lysine to Glycine substitution, or a Serine to Glycine substitution, a substitution at position 69 according to Kabat numbering, e.g., a Tyrosine to Asparagine substitution and a substitution at position 71 according to Kabat numbering, e.g., a Phenylalanine to Tyrosine substitution, or an Alanine to Tyrosine substitution. In some embodiments, the substitution is relative to a human germline light chain framework region sequence.

[0788] In some embodiments, the anti-TCRβV antibody molecule, e.g., anti-TCRβV12 antibody molecule comprises a light chain comprising: a framework region 1 (FR1) comprising a substitution at position 2 according to Kabat numbering, e.g., a Isoleucine to Asparagine substitution; and a framework region 3 (FR3), comprising a substitution at position 69 according to Kabat numbering, e.g., a Threonine to Asparagine substitution and a substitution at position 71 according to Kabat numbering, e.g., a Phenylalanine to Tyrosine substitution, e.g., as shown in the amino acid sequence of SEQ ID NO: 26. In some embodiments, the substitution is relative to a human germline light chain framework region sequence.

[0789] In some embodiments, the anti-TCRβV antibody molecule, e.g., anti-TCRβV12 antibody molecule comprises a light chain comprising: (a) a framework region 1 (FR1) comprising a substitution at position 1 according to Kabat numbering, e.g., a Alanine to Aspartic Acid substitution, and a substitution at position 2 according to Kabat numbering, e.g., a Isoleucine to Asparagine substitution; and (b) a framework region 3 (FR3), comprising a substitution at position 69 according to Kabat numbering, e.g., a Threonine to Asparagine substitution and a substitution at position 71 according to Kabat numbering, e.g., a Phenylalanine to Tyrosine substitution, e.g., as shown in the amino acid sequence of SEQ ID NO: 27. In some embodiments, the substitution is relative to a human germline light chain framework region sequence.

[0790] In some embodiments, the anti-TCRβV antibody molecule, e.g., anti-TCRβV12 antibody molecule comprises a light chain comprising: (a) a framework region 1 (FR1) comprising a substitution at position 2 according to Kabat numbering, e.g., a Serine to Asparagine substitution; and a substitution at position 4 according to Kabat numbering, e.g., a Methionine to Leucine substitution; and (b) a framework region 3 (FR3), comprising a substitution at position 69 according to Kabat numbering, e.g., a Threonine to Asparagine substitution and a substitution at position 71 according to Kabat numbering, e.g., a Phenylalanine to Tyrosine substitution, e.g., as shown in the amino acid sequence of SEQ ID NO: 28. In some embodiments, the substitution is relative to a human germline light chain framework region sequence.

[0791] In some embodiments, the anti-TCRβV antibody molecule, e.g., anti-TCRβV12 antibody molecule comprises a light chain comprising: (a) a framework region 1 (FR1) comprising a substitution at position 2 according to Kabat numbering, e.g., a Serine to Asparagine substitution; and (b) a framework region 3 (FR3) comprising a substitution at position 66 according to Kabat numbering, e.g., a Lysine to Glycine substitution; a substitution at position 69 according to Kabat numbering, e.g., a Threonine to Asparagine substitution; and a substitution at position 71 according to Kabat numbering, e.g., a Alanine to Tyrosine substitution, e.g., as shown in the amino acid sequence of SEQ ID NO: 29. In some embodiments, the substitution is relative to a human germline light chain framework region sequence.

[0792] In some embodiments, the anti-TCRβV antibody molecule, e.g., anti-TCRβV12 antibody molecule comprises a light chain comprising: (a) a framework region 1 (FR1) comprising a substitution at position 2 according to Kabat numbering, e.g., a Tyrosine to Asparagine substitution; and (b) a framework region 3 (FR3) comprising a substitution at position 66 according to Kabat numbering, e.g., a Serine to Glycine substitution; a substitution at position 69 according to Kabat numbering, e.g., a Threonine to Asparagine substitution; and a substitution at position 71 according to Kabat numbering, e.g., a Alanine to Tyrosine substitution, e.g., as shown in the amino acid sequence of SEQ ID NO: 29. In some embodiments, the substitution is relative to a human germline light chain framework region sequence.

[0793] In some embodiments, the anti-TCRβV antibody molecule, e.g., anti-TCRβV12 antibody molecule comprises a light chain variable domain comprising: (a) a framework region 1 (FR1) comprising a change, e.g., a substitution (e.g., a conservative substitution) at one or more (e.g., all) positions disclosed herein according to Kabat numbering, and (b) a framework region 3 (FR3) comprising a change, e.g., a substitution (e.g., a conservative substitution) at one or more (e.g., all) position disclosed herein according to Kabat numbering. In some embodiments, the substitution is relative to a human germline light chain framework region sequence.

[0794] In some embodiments, the anti-TCRβV antibody molecule, e.g., anti-TCRβV12 antibody molecule comprises the heavy chain framework region 1, e.g., as shown in FIG. 2A.

[0795] In some embodiments, the anti-TCRβV antibody molecule, e.g., anti-TCRβV12 antibody molecule comprises the heavy chain framework region 2, e.g., as shown in FIG. 2A.

[0796] In some embodiments, the anti-TCRβV antibody molecule, e.g., anti-TCRβV12 antibody molecule comprises the heavy chain framework region 3, e.g., as shown in FIG. 2A.

[0797] In some embodiments, the anti-TCRβV antibody molecule, e.g., anti-TCRβV12 antibody molecule comprises the heavy chain framework region 4, e.g., as shown in FIG. 2A.

[0798] In some embodiments, the anti-TCRβV antibody molecule, e.g., anti-TCRβV12 antibody molecule comprises the heavy chain framework regions 1-4, e.g., SEQ ID NOS: 20-23, or as shown in FIG. 2A.

[0799] In some embodiments, the anti-TCRβV antibody molecule, e.g., anti-TCRβV12 antibody molecule comprises the light chain framework regions 1-4, e.g., SEQ ID NOs: 26-30, or as shown in FIG. 2B.

[0800] In some embodiments, the anti-TCRβV antibody molecule, e.g., anti-TCRβV12 antibody molecule comprises the heavy chain framework regions 1-4, e.g., SEQ ID NOs: 23-25; and the light chain framework regions 1-4, e.g., SEQ ID NOs: 26-30, or as shown in FIGS. 2A and 2B.

[0801] In some embodiments, the heavy or light chain variable domain, or both, of , the anti-TCRβV antibody molecule, e.g., anti-TCRβV12 antibody molecule includes an amino acid sequence, which is substantially identical to an amino acid disclosed herein, e.g., at least 80%, 85%, 90%, 92%, 95%, 97%, 98%, 99% or higher identical to a variable region of an antibody described herein, e.g., an antibody as described in Table 4, or encoded by the nucleotide sequence in Table 4; or which differs at least 1 or 5 residues, but less than 40, 30, 20, or 10 residues, from a variable region of an antibody described herein.

[0802] In some embodiments, the anti-TCRβV antibody molecule, e.g., anti-TCRβV12 antibody molecule comprises at least one, two, three, or four antigen-binding regions, e.g., variable regions, having an amino acid sequence as set forth in Table 4, or a sequence substantially identical thereto (e.g., a sequence at least about 85%, 90%, 95%, 99% or more identical thereto, or which differs by no more than 1, 2, 5, 10, or 15 amino acid residues from the sequences shown in Table 4. In another embodiment, the anti-TCRβV antibody molecule, e.g., anti-TCRβV12 antibody molecule includes a VH and/or VL domain encoded by a nucleic acid having a nucleotide sequence as set forth in Table 4, or a sequence substantially identical thereto (e.g., a sequence at least about 85%, 90%, 95%, 99% or more identical thereto, or which differs by no more than 3, 6, 15, 30, or 45 nucleotides from the sequences shown in Table 4.

[0803] In some embodiments, the anti-TCRβV antibody molecule, e.g., anti-TCRβV12 antibody molecule comprises:
[0804] a VH domain comprising an amino acid sequence chosen from the amino acid sequence of SEQ ID NO: 23, SEQ ID NO: 24 or SEQ ID NO: 25, an amino acid sequence at least about 85%, 90%, 95%, 99% or more identical to the amino acid sequence SEQ ID NO: 23, SEQ ID NO: 24 or SEQ ID NO: 25, or an amino acid sequence which differs by no more than 1, 2, 5, 10, or 15 amino acid residues from the amino acid sequence of SEQ ID NO: 23, SEQ ID NO: 24, or SEQ ID NO: 25; and/or
[0805] a VL domain comprising an amino acid sequence chosen from the amino acid sequence of SEQ ID NO: 26, SEQ ID NO: 27, SEQ ID NO: 28, SEQ ID NO: 29, or SEQ ID NO: 30, an amino acid sequence at least about 85%, 90%, 95%, 99% or more identical to the amino acid sequence of SEQ ID NO: 26, SEQ ID NO: 27, SEQ ID NO: 28, SEQ ID NO: 29, or SEQ ID NO: 30, or an amino acid sequence which differs by no more than 1, 2, 5, 10, or 15 amino acid residues from the amino acid sequence of SEQ ID NO: 26, SEQ ID NO: 27, SEQ ID NO: 28, SEQ ID NO: 29, or SEQ ID NO: 30.

[0806] In some embodiments, the anti-TCRβV antibody molecule, e.g., anti-TCRβV12 antibody molecule comprises:
[0807] a VH domain comprising the amino acid sequence of SEQ ID NO: 23, an amino acid sequence at least about 85%, 90%, 95%, 99% or more identical to the amino acid sequence SEQ ID NO: 23, or an amino acid sequence which differs by no more than 1, 2, 5, 10, or 15 amino acid residues from the amino acid sequence of SEQ ID NO: 23; and
[0808] a VL domain comprising the amino acid sequence of SEQ ID NO: 26, an amino acid sequence at least about 85%, 90%, 95%, 99% or more identical to the amino acid sequence SEQ ID NO: 26, or an amino acid sequence which differs by no more than 1, 2, 5, 10, or 15 amino acid residues from the amino acid sequence of SEQ ID NO: 26.

[0809] In some embodiments, the anti-TCRβV antibody molecule, e.g., anti-TCRβV12 antibody molecule comprises:
[0810] a VH domain comprising the amino acid sequence of SEQ ID NO: 23, an amino acid sequence at least about 85%, 90%, 95%, 99% or more identical to the amino acid sequence SEQ ID NO: 23, or an amino acid sequence which differs by no more than 1, 2, 5, 10, or 15 amino acid residues from the amino acid sequence of SEQ ID NO: 23; and
[0811] a VL domain comprising the amino acid sequence of SEQ ID NO: 27, an amino acid sequence at least about 85%, 90%, 95%, 99% or more identical to the amino acid sequence SEQ ID NO: 27, or an amino acid sequence which differs by no more than 1, 2, 5, 10, or 15 amino acid residues from the amino acid sequence of SEQ ID NO: 27.

[0812] In some embodiments, the anti-TCRβV antibody molecule, e.g., anti-TCRβV12 antibody molecule comprises:
[0813] a VH domain comprising the amino acid sequence of SEQ ID NO: 23, an amino acid sequence at least about 85%, 90%, 95%, 99% or more identical to the amino acid sequence SEQ ID NO: 23, or an amino acid sequence which differs by no more than 1, 2, 5, 10, or 15 amino acid residues from the amino acid sequence of SEQ ID NO: 23; and
[0814] a VL domain comprising the amino acid sequence of SEQ ID NO: 28, an amino acid sequence at least about 85%, 90%, 95%, 99% or more identical to the amino acid sequence SEQ ID NO: 28, or an amino acid sequence which differs by no more than 1, 2, 5, 10, or 15 amino acid residues from the amino acid sequence of SEQ ID NO: 28.

[0815] In some embodiments, the anti-TCRβV antibody molecule, e.g., anti-TCRβV12 antibody molecule comprises:
[0816] a VH domain comprising the amino acid sequence of SEQ ID NO: 23, an amino acid sequence at least about 85%, 90%, 95%, 99% or more identical to the amino acid sequence SEQ ID NO: 23, or an amino acid sequence which differs by no more than 1, 2, 5, 10, or 15 amino acid residues from the amino acid sequence of SEQ ID NO: 23; and a VL domain comprising the amino acid sequence of SEQ ID NO: 29, an amino acid sequence at least about 85%, 90%, 95%, 99% or more identical to the amino acid sequence SEQ ID NO: 29, or an amino acid sequence which differs by no more than 1, 2, 5, 10, or 15 amino acid residues from the amino acid sequence of SEQ ID NO: 29.

[0817] In some embodiments, the anti-TCRβV antibody molecule, e.g., anti-TCRβV12 antibody molecule comprises: a VH domain comprising the amino acid sequence of SEQ ID NO: 23, an amino acid sequence at least about 85%, 90%, 95%, 99% or more identical to the amino acid sequence SEQ ID NO: 23, or an amino acid sequence which differs by no more than 1, 2, 5, 10, or 15 amino acid residues from the amino acid sequence of SEQ ID NO: 23; and a VL domain comprising the amino acid sequence of SEQ ID NO: 30, an amino acid sequence at least about 85%, 90%, 95%, 99% or more identical to the amino acid sequence SEQ ID NO: 30, or an amino acid sequence which differs by no more than 1, 2, 5, 10, or 15 amino acid residues from the amino acid sequence of SEQ ID NO: 30.

[0818] In some embodiments, the anti-TCRβV antibody molecule, e.g., anti-TCRβV12 antibody molecule comprises:
[0819] a VH domain comprising the amino acid sequence of SEQ ID NO: 24, an amino acid sequence at least about 85%, 90%, 95%, 99% or more identical to the amino acid sequence SEQ ID NO: 24, or an amino acid sequence which differs by no more than 1, 2, 5, 10, or 15 amino acid residues from the amino acid sequence of SEQ ID NO: 24; and
[0820] a VL domain comprising the amino acid sequence of SEQ ID NO: 26, an amino acid sequence at least about 85%, 90%, 95%, 99% or more identical to the amino acid sequence SEQ ID NO: 26, or an amino acid sequence which differs by no more than 1, 2, 5, 10, or 15 amino acid residues from the amino acid sequence of SEQ ID NO: 26.

[0821] In some embodiments, the anti-TCRβV antibody molecule, e.g., anti-TCRβV12 antibody molecule comprises:
[0822] a VH domain comprising the amino acid sequence of SEQ ID NO: 24, an amino acid sequence at least about 85%, 90%, 95%, 99% or more identical to the amino acid sequence SEQ ID NO: 24, or an amino acid sequence which differs by no more than 1, 2, 5, 10, or 15 amino acid residues from the amino acid sequence of SEQ ID NO: 24; and
[0823] a VL domain comprising the amino acid sequence of SEQ ID NO: 27, an amino acid sequence at least about 85%, 90%, 95%, 99% or more identical to the amino acid sequence SEQ ID NO: 27, or an amino acid sequence which differs by no more than 1, 2, 5, 10, or 15 amino acid residues from the amino acid sequence of SEQ ID NO: 27.

[0824] In some embodiments, the anti-TCRβV antibody molecule, e.g., anti-TCRβV12 antibody molecule comprises:
[0825] a VH domain comprising the amino acid sequence of SEQ ID NO: 24, an amino acid sequence at least about 85%, 90%, 95%, 99% or more identical to the amino acid sequence SEQ ID NO: 24, or an amino acid sequence which differs by no more than 1, 2, 5, 10, or 15 amino acid residues from the amino acid sequence of SEQ ID NO: 24; and
[0826] a VL domain comprising the amino acid sequence of SEQ ID NO: 28, an amino acid sequence at least about 85%, 90%, 95%, 99% or more identical to the amino acid sequence SEQ ID NO: 28, or an amino acid sequence which differs by no more than 1, 2, 5, 10, or 15 amino acid residues from the amino acid sequence of SEQ ID NO: 28.

[0827] In some embodiments, the anti-TCRβV antibody molecule, e.g., anti-TCRβV12 antibody molecule comprises:
[0828] a VH domain comprising the amino acid sequence of SEQ ID NO: 24, an amino acid sequence at least about 85%, 90%, 95%, 99% or more identical to the amino acid sequence SEQ ID NO: 24, or an amino acid sequence which differs by no more than 1, 2, 5, 10, or 15 amino acid residues from the amino acid sequence of SEQ ID NO: 24; and
[0829] a VL domain comprising the amino acid sequence of SEQ ID NO: 29, an amino acid sequence at least about 85%, 90%, 95%, 99% or more identical to the amino acid sequence SEQ ID NO: 29, or an amino acid sequence which differs by no more than 1, 2, 5, 10, or 15 amino acid residues from the amino acid sequence of SEQ ID NO: 29.

[0830] In some embodiments, the anti-TCRβV antibody molecule, e.g., anti-TCRβV12 antibody molecule comprises:
[0831] a VH domain comprising the amino acid sequence of SEQ ID NO: 24, an amino acid sequence at least about 85%, 90%, 95%, 99% or more identical to the amino acid sequence SEQ ID NO: 24, or an amino acid sequence which differs by no more than 1, 2, 5, 10, or 15 amino acid residues from the amino acid sequence of SEQ ID NO: 24; and
[0832] a VL domain comprising the amino acid sequence of SEQ ID NO: 30, an amino acid sequence at least about 85%, 90%, 95%, 99% or more identical to the amino acid sequence SEQ ID NO: 30, or an amino acid sequence which differs by no more than 1, 2, 5, 10, or 15 amino acid residues from the amino acid sequence of SEQ ID NO: 30.

[0833] In some embodiments, the anti-TCRβV antibody molecule, e.g., anti-TCRβV12 antibody molecule comprises:
[0834] a VH domain comprising the amino acid sequence of SEQ ID NO: 25, an amino acid sequence at least about 85%, 90%, 95%, 99% or more identical to the amino acid sequence SEQ ID NO: 25, or an amino acid sequence which differs by no more than 1, 2, 5, 10, or 15 amino acid residues from the amino acid sequence of SEQ ID NO: 25; and
[0835] a VL domain comprising the amino acid sequence of SEQ ID NO: 26, an amino acid sequence at least about 85%, 90%, 95%, 99% or more identical to the amino acid sequence SEQ ID NO: 26, or an amino acid sequence which differs by no more than 1, 2, 5, 10, or 15 amino acid residues from the amino acid sequence of SEQ ID NO: 26.

[0836] In some embodiments, the anti-TCRβV antibody molecule, e.g., anti-TCRβV12 antibody molecule comprises:
[0837] a VH domain comprising the amino acid sequence of SEQ ID NO: 25, an amino acid sequence at least about 85%, 90%, 95%, 99% or more identical to the amino acid sequence SEQ ID NO: 25, or an amino acid sequence which differs by no more than 1, 2, 5, 10, or 15 amino acid residues from the amino acid sequence of SEQ ID NO: 25; and
[0838] a VL domain comprising the amino acid sequence of SEQ ID NO: 27, an amino acid sequence at least about 85%, 90%, 95%, 99% or more identical to the amino acid sequence SEQ ID NO: 27, or an amino acid sequence which differs by no more than 1, 2, 5, 10, or 15 amino acid residues from the amino acid sequence of SEQ ID NO: 27.

[0839] In some embodiments, the anti-TCRβV antibody molecule, e.g., anti-TCRβV12 antibody molecule comprises:
[0840] a VH domain comprising the amino acid sequence of SEQ ID NO: 25, an amino acid sequence at least about 85%, 90%, 95%, 99% or more identical to the amino acid sequence SEQ ID NO: 25, or an amino acid sequence which differs by no more than 1, 2, 5, 10, or 15 amino acid residues from the amino acid sequence of SEQ ID NO: 25; and
[0841] a VL domain comprising the amino acid sequence of SEQ ID NO: 28, an amino acid sequence at least about 85%, 90%, 95%, 99% or more identical to the amino acid sequence SEQ ID NO: 28, or an amino acid sequence which differs by no more than 1, 2, 5, 10, or 15 amino acid residues from the amino acid sequence of SEQ ID NO: 28.

[0842] In some embodiments, the anti-TCRβV antibody molecule, e.g., anti-TCRβV12 antibody molecule comprises:
[0843] a VH domain comprising the amino acid sequence of SEQ ID NO: 25, an amino acid sequence at least about 85%, 90%, 95%, 99% or more identical to the amino acid sequence SEQ ID NO: 25, or an amino acid sequence which differs by no more than 1, 2, 5, 10, or 15 amino acid residues from the amino acid sequence of SEQ ID NO: 25; and
[0844] a VL domain comprising the amino acid sequence of SEQ ID NO: 29, an amino acid sequence at least about 85%, 90%, 95%, 99% or more identical to the amino acid sequence SEQ ID NO: 29, or an amino acid sequence which differs by no more than 1, 2, 5, 10, or 15 amino acid residues from the amino acid sequence of SEQ ID NO: 29.

[0845] In some embodiments, the anti-TCRβV antibody molecule, e.g., anti-TCRβV12 antibody molecule comprises:
[0846] a VH domain comprising the amino acid sequence of SEQ ID NO: 25, an amino acid sequence at least about 85%, 90%, 95%, 99% or more identical to the amino acid sequence SEQ ID NO: 25, or an amino acid sequence which differs by no more than 1, 2, 5, 10, or 15 amino acid residues from the amino acid sequence of SEQ ID NO: 25; and
[0847] a VL domain comprising the amino acid sequence of SEQ ID NO: 30, an amino acid sequence at least about 85%, 90%, 95%, 99% or more identical to the amino acid sequence SEQ ID NO: 30, or an amino acid sequence which differs by no more than 1, 2, 5, 10, or 15 amino acid residues from the amino acid sequence of SEQ ID NO: 30.

[0848] In some embodiments, the anti-TCRβV antibody molecule, e.g., anti-TCRβV12 antibody molecule is a full antibody or fragment thereof (e.g., a Fab, F(ab′)₂, Fv, or a single chain Fv fragment (scFv)). In embodiments, the anti-TCRβV antibody molecule, e.g., anti-TCRβV6 (e.g., anti-TCRβV6-5*01) antibody molecule is a monoclonal antibody or an antibody with single specificity. In some embodiments, the anti-TCRβV antibody molecule, e.g., anti-TCRβV12 antibody molecule, can also be a humanized, chimeric, camelid, shark, or an in vitro-generated antibody molecule. In some embodiments, the anti-TCRβV antibody molecule, e.g., anti-TCRβV12 antibody molecule is a humanized antibody molecule. The heavy and light chains of the anti-TCRβV antibody molecule, e.g., anti-TCRβV12 antibody molecule can be full-length (e.g., an antibody can include at least one, and preferably two, complete heavy chains, and at least one, and preferably two, complete light chains) or can include an antigen-binding fragment (e.g., a Fab, F(ab′)₂, Fv, a single chain Fv fragment, a single domain antibody, a diabody (dAb), a bivalent antibody, or bispecific antibody or fragment thereof, a single domain variant thereof, or a camelid antibody).

[0849] In some embodiments, the anti-TCRβV antibody molecule, e.g., anti-TCRβV12 antibody molecule is in the form of a multispecific molecule, e.g., a bispecific molecule, e.g., as described herein.

[0850] In some embodiments, the anti-TCRβV antibody molecule, e.g., anti-TCRβV12 antibody molecule has a heavy chain constant region (Fc) chosen from, e.g., the heavy chain constant regions of IgG1, IgG2, IgG3, IgG4, IgM, IgA1, IgA2, IgD, and IgE. In some embodiments, the Fc region is chosen from the heavy chain constant regions of IgG1, IgG2, IgG3, and IgG4. In some embodiments, the Fc region is chosen from the heavy chain constant region of IgG1 or IgG2 (e.g., human IgG1, or IgG2). In some embodiments, the heavy chain constant region is human IgG1.

[0851] In some embodiments, the anti-TCRβV antibody molecule, e.g., anti-TCRβV12 antibody molecule has a light chain constant region chosen from, e.g., the light chain constant regions of kappa or lambda, preferably kappa (e.g., human kappa). In one embodiment, the constant region is altered, e.g., mutated, to modify the properties of the anti-TCRβV antibody molecule, e.g., anti-TCRβV12 antibody molecule (e.g., to increase or decrease one or more of: Fc receptor binding, antibody glycosylation, the number of cysteine residues, effector cell function, or complement function). For example, the constant region is mutated at positions 296 (M to Y), 298 (S to T), 300 (T to E), 477 (H to K) and 478 (N to F) to alter Fc receptor binding (e.g., the mutated positions correspond to positions 132 (M to Y), 134 (S to T), 136 (T to E), 313 (H to K) and 314 (N to F) of SEQ ID NOs: 212 or 214; or positions 135 (M to Y), 137 (S to T), 139 (T to E), 316 (H to K) and 317 (N to F) of SEQ ID NOs: 215, 216, 217, or 218).

[0852] Antibody B-H.1 comprises a first chain comprising the amino acid sequence of SEQ ID NO: 3280 and a second chain comprising the amino acid sequence of SEQ ID NO: 3281.

[0853] Additional exemplary anti-TCRβV12 antibodies of the disclosure are provided in Table 4. In some embodiments, the anti-TCRβV12 is antibody B, e.g., humanized antibody B (antibody B-H), as provided in Table 4. In some embodiments, the anti-TCRβV antibody comprises one or more (e.g., all three) of a LC CDR1, LC CDR2, and LC CDR3 provided in Table 4; and/or one or more (e.g., all three) of a HC CDR1, HC CDR2, and HC CDR3 provided in Table 4, or a sequence with at least 95% identity thereto. In some embodiments, antibody B comprises a variable heavy chain (VH) and/or a variable light chain (VL) provided in Table 4, or a sequence with at least 95% identity thereto.

TABLE 4
Amino acid and nucleotide sequences for murine and humanized antibody
molecules which bind to TCRVB 12, e.g., TCRVB 12-3 or TCRVB 12-4. The
antibody molecules include murine mAb Antibody B and humanized mAb
Antibody B-H.1 to B-H.6. The amino acid the heavy and light chain CDRs,
and the amino acid and nucleotide sequences of the heavy and light
chain variable regions, and the heavy and light chains are shown.
Antibody B (murine)

| | | |
|---|---|---|
| SEQ ID NO: 17 | HC CDR1 (Combined) | GFTFSNFGMH |
| SEQ ID NO: 18 | HC CDR2 (Combined) | YISSGSSTIYYADTLKG |
| SEQ ID NO: 19 | HC CDR3 (Combined) | RGEGAMDY |
| SEQ ID NO: 57 | HC CDR1 (Kabat) | NFGMH |
| SEQ ID NO: 58 | HC CDR2 (Kabat) | YISSGSSTIYYADTLKG |
| SEQ ID NO: 59 | HC CDR3 (Kabat) | RGEGAMDY |
| SEQ ID NO: 60 | HC CDR1 (Chothia) | GFTFSNF |
| SEQ ID NO: 61 | HC CDR2 (Chothia) | SSGSST |
| SEQ ID NO: 62 | HC CDR3 (Chothia) | RGEGAMDY |
| SEQ ID NO: 15 | VH | DVQLVESGGGLVQPGGSRKLSCAASGFTFSNFGMHWVRQAPD |
| | | KGLEWVAYISSGSSTIYYADTLKGRFTISRDNPKNTLFLQMT |
| | | SLRSEDTAMYYCARRGEGAMDYWGQGTSVTVSS |
| SEQ ID NO: 20 | LC CDR1 (Combined) | RASSSVNYIY |
| SEQ ID NO: 21 | LC CDR2 (Combined) | YTSNLAP |
| SEQ ID NO: 22 | LC CDR3(Combined) | QQFTSSPFT |
| SEQ ID NO: 63 | LC CDR1 (Kabat) | RASSSVNYIY |
| SEQ ID NO: 64 | LC CDR2 (Kabat) | YTSNLAP |
| SEQ ID NO: 65 | LC CDR3 (Kabat) | QQFTSSPFT |
| SEQ ID NO: 66 | LC CDR1 (Chothia) | RASSSVNYIY |
| SEQ ID NO: 67 | LC CDR2 (Chothia) | YTSNLAP |
| SEQ ID NO: 68 | LC CDR3 (Chothia) | QQFTSSPFT |
| SEQ ID NO: 16 | VL | ENVLTQSPAIMSASLGEKVTMSCRASSSVNYIYWYQQKSDAS |
| | | PKLWIYYTSNLAPGVPTRFSGSGSGNSYSLTISSMEGEDAAT |
| | | YYCQQFTSSPFTFGSGTKLEIK |

Antibody B humanized (B-H)
Antibody B-H.1A HC-1

| | | |
|---|---|---|
| SEQ ID NO: 17 | HC CDR1 (Combined) | GFTFSNFGMH |
| SEQ ID NO: 18 | HC CDR2 (Combined) | YISSGSSTIYYADTLKG |
| SEQ ID NO: 19 | HC CDR3 (Combined) | RGEGAMDY |
| SEQ ID NO: 23 | VH | EVQLVESGGGLVQPGGSLRLSCAASGFTFSNFGMHWVRQAPG |
| | | KGLEWVSYISSGSSTIYYADTLKGRFTISRDNAKNSLYLQMN |
| | | SLRAEDTAVYYCARRGEGAMDYWGQGTTVTVSS |
| SEQ ID NO: 31 | DNA VH | GAGGTGCAGCTGGTTGAATCTGGCGGAGGATTGGTTCAGCCT |
| | | GGCGGCTCTCTGAGACTGTCTTGTGCCGCTTCTGGCTTCACC |
| | | TTCTCCAACTTCGGCATGCACTGGGTCCGACAGGCCCCTGGA |
| | | AAAGGACTGGAATGGGTGTCCTACATCTCCTCCGGCTCCTCC |
| | | ACCATCTACTACGCTGACACCCTGAAGGGCAGATTCACCATC |
| | | TCTCGGGACAACGCCAAGAACTCCCTGTACCTGCAGATGAAC |
| | | AGCCTGAGAGCCGAGGACACCGCCGTGTACTACTGTGCTAGA |
| | | AGAGGCGAGGGCGCCATGGATTATTGGGGCCAGGGAACCACA |
| | | GTGACCGTGTCTAGC |

Antibody B-H.1B HC-2

| | | |
|---|---|---|
| SEQ ID NO: 17 | HC CDR1 (Combined) | GFTFSNFGMH |
| SEQ ID NO: 18 | HC CDR2 (Combined) | YISSGSSTIYYADTLKG |
| SEQ ID NO: 19 | HC CDR3 (Combined) | RGEGAMDY |
| SEQ ID NO: 24 | VH | EVQLVESGGGLVQPGGSLRLSCAASGFTFSNFGMHWVRQAPG |
| | | KGLEWVSYISSGSSTIYYADTLKGRFTISRDNSKNTLYLQMN |
| | | SLRAEDTAVYYCARRGEGAMDYWGQGTTVTVSS |
| SEQ ID NO: 32 | DNA VH | GAGGTGCAGCTGGTTGAATCTGGCGGAGGATTGGTTCAGCCT |
| | | GGCGGCTCTCTGAGACTGTCTTGTGCCGCTTCTGGCTTCACC |
| | | TTCTCCAACTTCGGCATGCACTGGGTCCGACAGGCCCCTGGA |
| | | AAAGGACTGGAATGGGTGTCCTACATCTCCTCCGGCTCCTCC |
| | | ACCATCTACTACGCTGACACCCTGAAGGGCAGATTCACCATC |
| | | AGCCGGGACAACTCCAAGAACACCCTGTACCTGCAGATGAAC |
| | | TCCCTGAGAGCCGAGGACACCGCCGTGTACTACTGTGCTAGA |
| | | AGAGGCGAGGGCGCCATGGATTATTGGGGCCAGGGAACCACA |
| | | GTGACCGTGTCTAGC |

Antibody B-H.1C HC-3

| | | |
|---|---|---|
| SEQ ID NO: 17 | HC CDR1 (Combined) | GFTFSNFGMH |
| SEQ ID NO: 18 | HC CDR2 (Combined) | YISSGSSTIYYADTLKG |
| SEQ ID NO: 19 | HC CDR3 (Combined) | RGEGAMDY |
| SEQ ID NO: 25 | VH | QVQLVESGGGVVQPGRSLRLSCAASGFTFSNFGMHWVRQAPG |
| | | KGLEWVAYISSGSSTIYYADTLKGRFTISRDNSKNTLYLQMN |
| | | SLRAEDTAVYYCARRGEGAMDYWGQGTTVTVSS |
| SEQ ID NO: 33 | DNA VH | CAGGTGCAGCTGGTGGAATCTGGTGGCGGAGTTGTGCAGCCT |
| | | GGCAGATCCCTGAGACTGTCTTGTGCCGCCTCTGGCTTCACC |
| | | TTCTCCAACTTCGGCATGCACTGGGTCCGACAGGCCCCTGGA |
| | | AAAGGATTGGAGTGGGTCGCCTACATCTCCTCCGGCTCCTCC |
| | | ACCATCTACTACGCTGACACCCTGAAGGGCAGATTCACCATC |
| | | AGCCGGGACAACTCCAAGAACACCCTGTACCTGCAGATGAAC |
| | | TCCCTGAGAGCCGAGGACACCGCCGTGTACTACTGTGCTAGA |
| | | AGAGGCGAGGGCGCCATGGATTATTGGGGCCAGGGAACCACA |
| | | GTGACCGTGTCTAGC |

Antibody B-H.1D LC-1

| | | |
|---|---|---|
| SEQ ID NO: 20 | LC CDR1 (Combined) | RASSSVNYIY |
| SEQ ID NO: 21 | LC CDR2 (Combined) | YTSNLAP |
| SEQ ID NO: 22 | LC CDR3(Combined) | QQFTSSPFT |
| SEQ ID NO: 26 | VL | DNQLTQSPSFLSASVGDRVTITCRASSSVNYIYWYQQKPGKA |
| | | PKLLIYYTSNLAPGVPSRFSGSGSGNEYTLTISSLQPEDFAT |
| | | YYCQQFTSSPFTFGQGTKLEIK |
| SEQ ID NO: 34 | DNA VL | GATAACCAGCTGACCCAGTCTCCTAGCTTCCTGTCTGCCTCT |
| | | GTGGGCGACAGAGTGACAATTACCTGCCGGGCCTCCTCCTCC |
| | | GTGAACTACATCTACTGGTATCAGCAGAAGCCCGGCAAGGCC |
| | | CCTAAGCTGCTGATCTACTACACCTCCAATCTGGCCCCTGGC |
| | | GTGCCCTCTAGATTTTCCGGATCTGGCTCCGGCAACGAGTAT |
| | | ACCCTGACAATCTCCAGCCTGCAGCCTGAGGACTTCGCCACC |
| | | TACTACTGCCAGCAGTTCACCTCCTCTCCATTCACCTTTGGC |
| | | CAGGGCACCAAGCTGGAAATCAAA |

Antibody B-H.1E LC-2

| | | |
|---|---|---|
| SEQ ID NO: 20 | LC CDR1 (Combined) | RASSSVNYIY |
| SEQ ID NO: 21 | LC CDR2 (Combined) | YTSNLAP |
| SEQ ID NO: 22 | LC CDR3(Combined) | QQFTSSPFT |
| SEQ ID NO: 27 | VL | DNQLTQSPSSLSASVGDRVTITCRASSSVNYIYWYQQKPGKA |
| | | PKLLIYYTSNLAPGVPSRFSGSGSGNDYTLTISSLQPEDFAT |
| | | YYCQQFTSSPFTFGQGTKLEIK |
| SEQ ID NO: 35 | DNA VL | ATAACCAGCTGACCCAGTCTCCTTCCAGCCTGTCTGCTTCTG |
| | | TGGGCGACAGAGTGACAATTACCTGCCGGGCCTCCTCCTCCG |
| | | TGAACTACATCTACTGGTATCAGCAGAAGCCCGGCAAGGCCC |
| | | CTAAGCTGCTGATCTACTACACCTCCAATCTGGCCCCTGGCG |
| | | TGCCCTCTAGATTTTCCGGATCTGGCTCCGGCAACGACTATA |
| | | CCCTGACAATCTCCAGCCTGCAGCCTGAGGACTTCGCCACCT |
| | | ACTACTGCCAGCAGTTCACCTCCTCTCCATTCACCTTTGGCC |
| | | AGGGCACCAAGCTGGAAATCAAA |

Antibody B-H.1F LC-3

| | | |
|---|---|---|
| SEQ ID NO: 20 | LC CDR1 (Combined) | RASSSVNYIY |
| SEQ ID NO: 21 | LC CDR2 (Combined) | YTSNLAP |
| SEQ ID NO: 22 | LC CDR3(Combined) | QQFTSSPFT |
| SEQ ID NO: 28 | VL | ENVLTQSPATLSVSPGERATLSCRASSSVNYIYWYQQKPGQA |
| | | PRLLIYYTSNLAPGIPARFSGSGSGNEYTLTISSLQSEDFAV |
| | | YYCQQFTSSPFTFGQGTKLEIK |
| SEQ ID NO: 36 | DNA VL | GAGAATGTGCTGACCCAGTCTCCTGCCACACTGTCTGTTAGC |
| | | CCTGGCGAGAGAGCTACCCTGAGCTGCAGAGCCTCTTCCTCC |
| | | GTGAACTACATCTACTGGTATCAGCAGAAGCCCGGCCAGGCT |
| | | CCTAGACTGCTGATCTACTACACCTCCAATCTGGCCCCTGGC |
| | | ATCCCTGCCAGATTTTCCGGATCTGGCTCCGGCAACGAGTAT |
| | | ACCCTGACCATCTCCAGCCTGCAGTCCGAGGACTTTGCTGTG |
| | | TACTATTGCCAGCAGTTCACAAGCAGCCCTTTCACCTTTGGC |
| | | CAGGGCACCAAGCTGGAAATCAAA |

Antibody B-H.1G LC-4

| | | |
|---|---|---|
| SEQ ID NO: 20 | LC CDR1 (Combined) | RASSSVNYIY |
| SEQ ID NO: 21 | LC CDR2 (Combined) | YTSNLAP |
| SEQ ID NO: 22 | LC CDR3(Combined) | QQFTSSPFT |
| SEQ ID NO: 29 | VL | QNVLTQPPSASGTPGQRVTISCRASSSVNYIYWYQQLPGTAP |
| | | KLLIYYTSNLAPGVPDRFSGSGSGNSYSLAISGLRSEDEADY |
| | | YCQQFTSSPFTFGTGTKVTVL |
| SEQ ID NO: 37 | DNA VL | CAGAATGTGCTGACCCAACCTCCTTCCGCCTCTGGCACACCT |
| | | GGACAGAGAGTGACAATCTCCTGCCGGGCCTCCTCCTCCGTG |
| | | AACTACATCTACTGGTATCAGCAGCTGCCCGGCACCGCTCCT |
| | | AAACTGCTGATCTACTACACCTCCAATCTGGCCCCTGGCGTG |
| | | CCCGATAGATTTTCCGGATCTGGCTCCGGCAACTCCTACAGC |
| | | CTGGCTATCTCTGGCCTGAGATCTGAGGACGAGGCCGACTAC |
| | | TACTGCCAGCAGTTCACCTCCTCTCCATTCACCTTTGGCACC |
| | | GGCACCAAAGTGACAGTTCTT |

Antibody B-H.1H LC-5

| | | |
|---|---|---|
| SEQ ID NO: 20 | LC CDR1 (Combined) | RASSSVNYIY |
| SEQ ID NO: 21 | LC CDR2 (Combined) | YTSNLAP |
| SEQ ID NO: 22 | LC CDR3(Combined) | QQFTSSPFT |
| SEQ ID NO: 30 | VL | SNELTQPPSVSVSPGQTARITCRASSSVNYIYWYQQKSGQAP |
| | | VLVIYYTSNLAPGIPERFSGSGSGNMYTLTISGAQVEDEADY |
| | | YCQQFTSSPFTFGTGTKVTVL |
| SEQ ID NO: 38 | DNA VL | TCTAATGAGCTGACCCAGCCTCCTTCCGTGTCCGTGTCTCCT |
| | | GGACAGACCGCCAGAATTACCTGCCGGGCCTCCTCCTCCGTG |
| | | AACTACATCTACTGGTATCAGCAGAAGTCCGGCCAGGCTCCT |
| | | GTGCTCGTGATCTACTACACCTCCAATCTGGCCCCTGGCATC |
| | | CCTGAGAGATTCTCCGGATCTGGCTCCGGCAACATGTACACC |
| | | CTGACCATCTCTGGCGCCCAGGTGGAAGATGAGGCCGACTAC |
| | | TACTGCCAGCAGTTCACCTCCTCTCCATTCACCTTTGGCACC |
| | | GGCACCAAAGTGACAGTTCTT |

Antibody B-H.1

| | | |
|---|---|---|
| SEQ ID NO: 3280 | Chain1: Fc only | METDTLLLWVLLLWVPGSTGDKTHTCPPCPAPELLGGPSVFL |
| | | FPPKPKDTLMISRTPEVTCVVVDVSHEDPEVKFNWYVDGVEV |
| | | HNAKTKPREEQYNSTYRVVSVLTVLHQDWLNGKEYKCKVSNK |
| | | ALPAPIEKTISKAKGQPREPQVYTLPPCREEMTKNQVSLWCL |
| | | VKGFYPSDIAVEWESNGQPENNYKTTPPVLDSDGSFFLYSKL |
| | | TVDKSRWQQGNVFSCSVMHEALHNRFTQKSLSLSPGK |
| SEQ ID NO: 3281 | Chain2. humanized | METDTLLLWVLLLWVPGSTGEVQLVESGGGLVQPGGSLRLSC |
| | B-H scFv | AASGFTFSNFGMHWVRQAPGKGLEWVSYISSGSSTIYYADTL |
| | | KGRFTISRDNSKNTLYLQMNSLRAEDTAVYYCARRGEGAMDY |
| | | WGQGTTVTVSSGGGGSGGGGSGGGGSGGGGSDNQLTQSPSFL |
| | | SASVGDRVTITCRASSSVNYIYWYQQKPGKAPKLLIYYTSNL |
| | | APGVPSRFSGSGSGNEYTLTISSLQPEDFATYYCQQFTSSPF |
| | | TFGQGTKLEIKGGGGSDKTHTCPPCPAPELLGGPSVFLFPPK |
| | | PKDTLMISRTPEVTCVVVDVSHEDPEVKFNWYVDGVEVHNAK |
| | | TKPREEQYNSTYRVVSVLTVLHQDWLNGKEYKCKVSNKALPA |
| | | PIEKTISKAKGQPREPQVCTLPPSREEMTKNQVSLSCAVKGF |
| | | YPSDIAVEWESNGQPENNYKTTPPVLDSDGSFFLVSKLTVDK |
| | | SRWQQGNVFSCSVMHEALHNHYTQKSLSLSPGKGGGGSGGGG |
| | | SGLNDIFEAQKIEWHE |
| SEQ ID NO: 1343 | scFv | EVQLVESGGGLVQPGGSLRLSCAASGFTFSNFGMHWVRQAPG |
| | | KGLEWVSYISSGSSTIYYADTLKGRFTISRDNSKNTLYLQMN |
| | | SLRAEDTAVYYCARRGEGAMDYWGQGTTVTVSSGGGGSGGGG |
| | | SGGGGSGGGGSDNQLTQSPSFLSASVGDRVTITCRASSSVNY |
| | | IYWYQQKPGKAPKLLIYYTSNLAPGVPSRFSGSGSGNEYTLT |
| | | ISSLQPEDFATYYCQQFTSSPFTFGQGTKLEIK |

Antibody B-H.2

| | | |
|---|---|---|
| SEQ ID NO: 1338 | scFv | EVQLVESGGGLVQPGGSLRLSCAASGFTFSNFGMHWVRQAPG |
| | | KGLEWVSYISSGSSTIYYADTLKGRFTISRDNSKNTLYLQMN |
| | | SLRAEDTAVYYCARRGEGAMDYWGQGTTVTVSSGGGGSGGGG |
| | | SGGGGSGGGGSDNQLTQSPSSLSASVGDRVTITCRASSSVNY |
| | | IYWYQQKPGKAPKLLIYYTSNLAPGVPSRFSGSGSGNDYTLT |
| | | ISSLQPEDFATYYCQQFTSSPFTFGQGTKLEIK |

Antibody B-H.3

| | | |
|---|---|---|
| SEQ ID NO: 1339 | scFv | EVQLVESGGGLVQPGGSLRLSCAASGFTFSNFGMHWVRQAPG |
| | | KGLEWVSYISSGSSTIYYADTLKGRFTISRDNSKNTLYLQMN |
| | | SLRAEDTAVYYCARRGEGAMDYWGQGTTVTVSSGGGGSGGGG |
| | | SGGGGSGGGGSSNELTQPPSVSVSPGQTARITCRASSSVNYI |
| | | YWYQQKSGQAPVLVIYYTSNLAPGIPERFSGSGSGNMYTLTI |
| | | SGAQVEDEADYYCQQFTSSPFTFGTGTKVTVL |

Antibody B-H.4

| | | |
|---|---|---|
| SEQ ID NO: 1340 | scFv | QVQLVESGGGVVQPGRSLRLSCAASGFTFSNFGMHWVRQAPG |
| | | KGLEWVAYISSGSSTIYYADTLKGRFTISRDNSKNTLYLQMN |
| | | SLRAEDTAVYYCARRGEGAMDYWGQGTTVTVSSGGGGSGGGG |
| | | SGGGGSGGGGSDNQLTQSPSFLSASVGDRVTITCRASSSVNY |
| | | IYWYQQKPGKAPKLLIYYTSNLAPGVPSRFSGSGSGNEYTLT |
| | | ISSLQPEDFATYYCQQFTSSPFTFGQGTKLEIK |

Antibody B-H.5

| | | |
|---|---|---|
| SEQ ID NO: 1341 | scFv | QVQLVESGGGVVQPGRSLRLSCAASGFTFSNFGMHWVRQAPG |
| | | KGLEWVAYISSGSSTIYYADTLKGRFTISRDNSKNTLYLQMN |
| | | SLRAEDTAVYYCARRGEGAMDYWGQGTTVTVSSGGGGSGGGG |
| | | SGGGGSGGGGSDNQLTQSPSSLSASVGDRVTITCRASSSVNY |
| | | IYWYQQKPGKAPKLLIYYTSNLAPGVPSRFSGSGSGNDYTLT |
| | | ISSLQPEDFATYYCQQFTSSPFTFGQGTKLEIK |

Antibody B-H.6

| | | |
|---|---|---|
| SEQ ID NO: 1342 | scFv | QVQLVESGGGVVQPGRSLRLSCAASGFTFSNFGMHWVRQAPG |
| | | KGLEWVAYISSGSSTIYYADTLKGRFTISRDNSKNTLYLQMN |
| | | SLRAEDTAVYYCARRGEGAMDYWGQGTTVTVSSGGGGSGGGG |
| | | SGGGGSGGGGSSNELTQPPSVSVSPGQTARITCRASSSVNYI |
| | | YWYQQKSGQAPVLVIYYTSNLAPGIPERFSGSGSGNMYTLTI |
| | | SGAQVEDEADYYCQQFTSSPFTFGTGTKVTVL |

TABLE 5
Constant region amino acid sequences of
human IgG heavy chains and human kappa
light chain

| | | |
|---|---|---|
| Human | LC | RTVAAPSVFI FPPSDEQLKS |
| kappa | | GTASVVCLLN NFYPREAKVQ |
| constant | | WKVDNALQSG NSQESVTEQD |
| region | | SKDSTYSLSS TLTLSKADYE |
| SEQ ID | | KHKVYACEVT HQGLSSPVTK |
| NO: 39 | | SFNRGEC |
| IgG4 | HC | ASTKGPSVFPLAPCSRSTSES |
| (S228P) | | TAALGCLVKDYFPEPVTVSWN |
| mutant | | SGALTSIGVHTFPAVLQSSGL |
| constant | | YSLSSVVTVPSSSLGTKTYTC |
| region | | NVDHKPSNTKVDIKRVESKYG |
| (EU | | PPCPPCPAPEFLGGPSVFLFP |
| Numbering) | | PKPKDTLMISRTPEVTCVVIV |
| SEQ ID | | DVSQEDPEVQFNWYVDGVEVH |
| NO: 40 | | NAKTKPREEQFNSTYRVVSVL |
| | | TVILHQDWLNGKEYKCKVSNK |
| | | GLPSSIEKTISKAKGQPREPQ |
| | | VYTLPPSQIEEMTKNQVSLTC |
| | | LVKGFYPSDIAVEWESNGQPE |
| | | NNYKTTPPVLDSDIGSFFLYS |
| | | RLTVDKSRWQEGNVFSCSVMH |
| | | EALHNHYTQKSLSLSLG |
| IgG1 | HC | ASTKGPSVFPLAPSSKSTSGG |
| wild | | TAALGCLVKDYFPEPVTVSWN |
| type | | SGALTISGVHTFPAVLQSSGL |
| SEQ ID | | YSLSSVVTVPSSSLGTQTYIC |
| NO: 41 | | NVNHKPSNTKVDIKRVEPKSC |
| | | DKTHTCPPCPAPELLGGPSVF |
| | | LFPPKPKDTLMISRTPEVTIC |
| | | VVVDVSHEDPEVKFNWYVDGV |
| | | EVHNAKTKPREEQYNSTYRVV |
| | | SVILTVLHQDWLNGKEYKCKV |
| | | SNKALPAPIEKTISKAKGQPR |
| | | EPQVYTLPIPSREEMTKNQVS |
| | | LTCLVKGFYPSDIAVEWESNG |
| | | QPENNYKTTPPVLDISDGSFF |
| | | LYSKLTVDKSRWQQGNVFSCS |
| | | VMHEALHNHYTQKSLSLSPIG |
| | | K |
| IgG1 | HC | ASTKGPSVFPLAPSSKSTSGG |
| (N297A) | | TAALGCLVKDYFPEPVTVSWN |
| mutant | | SGALTISGVHTFPAVLQSSGL |
| constant | | YSLSSVVTVPSSSLGTQTYIC |
| region | | NVNHKPSNTKVDIKRVEPKSC |
| (EU | | DKTHTCPPCPAPELLGGPSVF |
| Numbering) | | LFPPKPKDTLMISRTPEVTIC |
| SEQ ID | | VVVDVSHEDPEVKFNWYVDGV |
| NO: 42 | | EVHNAKTKPREEQYASTYRVV |
| | | SVILTVLHQDWLNGKEYKCKV |
| | | SNKALPAPIEKTISKAKGQPR |
| | | EPQVYTLPIPSREEMTKNQVS |
| | | LTCLVKGFYPSDIAVEWESNG |
| | | QPENNYKTTPPVLDISDGSFF |
| | | LYSKLTVDKSRWQQGNVFSCS |
| | | VMHEALHNHYTQKSLSLSPIG |
| | | K |
| IgM | HC | GSASAPTLFPLVSCENSPSDT |
| constant | | SSVAVGCLAQDFLPDSITFSW |
| delta | | KYKNNSIDISSTRGFPSVLRG |
| CDC | | GKYAATSQVLLPSKDVMQGTD |
| (P311A, | | EHVVCKVQHPNIGNKEKNVPL |
| P313S) | | PVIAELPPKVSVFVPPRDGFF |
| SEQ ID | | GNPRKSKLICQATGFSPRIQI |
| NO: 73 | | QVSWLREGKQVGSGVTTDQVQ |
| | | AEAKESGPTTYKVTSTLTIKE |
| | | SDIWLGQSMFTCRVDHRGLTF |
| | | QQNASSMCVPDQDTAIRVFAI |
| | | PPSFASIFILTKSTKLTCLVT |
| | | DLTTYDSVTISWTRQNGEAVK |
| | | THTNISESHPNATFSIAVGEA |
| | | SICEDDWNSGERFTCTVTHTD |
| | | LASSLKQTISRPKGVALHRPD |
| | | IVYLLPPAREQLNLRESATIT |
| | | CLVTGFSPADVFVQWMQRGQP |
| | | LSPEKYIVTSAPMPEPQAPGR |
| | | YFAHSILTVSEEEWNTGETYT |
| | | CVVAHEALPNRVITERTVDKS |
| | | TGKPTLYNVSLVMSDTAGTCY |
| IgGA1 | HC | ASPTSPKVFPLSLCSTQPDGN |
| SEQ ID | | VVIACLVQGFFPQEPLSVTWS |
| NO: 74 | | ESGQGVITARNFPPSQDASGD |
| | | LYTTSSQLTLPATQCLAGKSV |
| | | TCHVKHYTNPSQIDVTVPCPV |
| | | PSTPPTPSPSTPPTPSPSCCH |
| | | PRLSLHRPALEDLLLGSEANI |
| | | LTCTLTGLRDASGVTFTWTPS |
| | | SGKSAVQGPPERDLCGCYSVS |
| | | SVLPGICAEPWNHGKTFTCTA |
| | | AYPESKTPLTATLSKSGNTFR |
| | | PEVHLLPPPSEEILALNELVT |
| | | LTCLARGFSPKDVLVRWLQGS |
| | | QELPREKYLTWASRQEPISQG |
| | | TTTFAVTSILRVAAEDWKKGD |
| | | TFSCMVGHEALPLAFTQKTID |
| | | RLIAGKPTHVNVSVVMAEVDG |
| | | TCY |
| IgGA2 | HC | ASPTSPKVFPLSLDSTPQDG |
| SEQ ID | | NVVVACLVQGFFPQEPLSVT |
| NO: 75 | | WSESGQNIVTARNFPPSQDA |
| | | SGDLYTTSSQLTLPATQCPD |
| | | GKSVTCHVKHYTNSSIQDVT |
| | | VPCRVPPPPPCCHPRLSLHR |
| | | PALEDLLLGSEANLTCTLTG |
| | | LRDAISGATFTWTPSSGKSA |
| | | VQGPPERDLCGCYSVSSVLP |
| | | GCAQPWNHGETIFTCTAAHP |
| | | ELKTPLTANITKSGNTFRPE |
| | | VHLLPPPSEELALNELVTLT |
| | | CILARGFSPKDVLVRWLQGS |
| | | QELPREKYLTWASRQEPSQG |
| | | TTTYAVTSIILRVAAEDWKK |
| | | GETFSCMVGHEALPLAFTQK |
| | | TIDRMAGKPTHINVSVIVMA |
| | | EADGTCY |
| Human | HC | MKNHLLFWGVLAVFIKAVHV |
| Ig_J | | KAQEDERIVLVDNKCKCARI |
| chain | | TSRIIRSISEDPNEDIVERN |
| SEQ ID | | IRIIVPLNNRENISDPTSPL |
| NO: 76 | | RTRFVYHLSDLCKKCDPTIE |
| | | VELDNQIVTATQSNICDEDS |
| | | ATETCYTYDRNKCYTAVVPL |
| | | VYGGETIKMVETALTPDACY |
| | | PD |

### Anti-TCRβV5 Antibodies

[0854] Accordingly, in one aspect, the disclosure provides an anti-TCRβV antibody molecule that binds to human TCRβ V5. In some embodiments, the TCRβ V5 subfamily comprises TCRβ V5-5*01, TCRβ V5-6*01, TCRβ V5-4*01, TCRβ V5-8*01, TCRβ V5-1*01, or a variant thereof.

[0855] Exemplary anti-TCRβV5 antibodies of the disclosure are provided in Table 6. In some embodiments, the anti-TCRβV5 is antibody C, e.g., humanized antibody C (antibody C-H), as provided in Table 6. In some embodiments, the anti-TCRβV antibody comprises one or more (e.g., all three) of a LC CDR1, LC CDR2, and LC CDR3 provided in Table 6; and/or one or more (e.g., all three) of a HC CDR1, HC CDR2, and HC CDR3 provided in Table 6, or a sequence with at least 95% identity thereto. In some embodiments, antibody C comprises a variable heavy chain (VH) and/or a variable light chain (VL) provided in Table 6, or a sequence with at least 95% identity thereto.

TABLE 6
Amino acid sequences for anti TCRβ V5 antibodies
Amino acid and nucleotide sequences for murine and humanized
antibody molecules which bind to TCRVB 5 (e.g., TCRVB 5-5 or
TCRVB 5-6). The amino acid the heavy and light chain CDRs,
and the amino acid and nucleotide sequences of the heavy and
light chain variable regions, and the heavy and light chains
are shown.
Murine antibody C

| | | |
|---|---|---|
| SEQ ID | HC CDR1 | AYGVN |
| NO: 1315 | (Kabat) | |
| SEQ ID | HC CDR2 | M1WGDGNTDYNSALRS |
| NO: 1316 | (Kabat) | |
| SEQ ID | HC CDR3 | DRVTATLYAMDY |
| NO: 1317 | (Kabat) | |
| SEQ ID | HC CDR1 | GFSLTAY |
| NO: 1318 | (Chothia) | |
| SEQ ID | HC CDR2 | WGDGN |
| NO: 1319 | (Chothia) | |
| SEQ ID | HC CDR3 | DRVTATLYAMDY |
| NO: 1317 | (Chothia) | |
| SEQ ID | HC CDR1 | GFSLTAYGVN |
| NO: 1320 | (Combined) | |
| SEQ ID | HC CDR2 | MIWGDGNTDYNSALRS |
| NO: 1316 | (Combined) | |
| SEQ ID | HC CDR3 | DRVTATLYAMDY |
| NO: 1317 | (Combined) | |
| SEQ ID | LC CDR1 | SASQGISNYLN |
| NO: 1321 | (Kabat) | |
| SEQ ID | LC CDR2 | YTSSLHS |
| NO: 1322 | (Kabat) | |
| SEQ ID | LC CDR3 | QQYSRLPRT |
| NO: 1323 | (Kabat) | |
| SEQ ID | LC CDR1 | SASQGISNYLN |
| NO: 1321 | (Chothia) | |
| SEQ ID | LC CDR2 | YTSSLHS |
| NO: 1322 | (Chothia) | |
| SEQ ID | LC CDR3 | QQYSRLPRT |
| NO: 1323 | (Chothia) | |
| SEQ ID | LC CDR1 | SASQGISNYLN |
| NO: 1321 | (Combined) | |
| SEQ ID | LC CDR2 | YTSSLHS |
| NO: 1322 | (Combined) | |
| SEQ ID | LC CDR3 | QQYSRLPRT |
| NO: 1323 | (Combined) | |
| SEQ ID | VH | DIQMTQTTSSLSASLGDRVTISCSASQGISNYLNW |
| NO: 232 | | YQQKPDGTVKLLIYYTSSLHSGVPSRFSGSGSGT |
| | | DYSLTISNLEPEDIATYYCQQYSKLPKTFGGGTK |
| | | VEIK |
| SEQ ID | VL | QVQLKESGPGLVAPSQSLSITCTVSGFSLTAYGV |
| NO: 233 | | NWVRQPPGKGLEWLGMIWGDGNTDYNSALKSR |
| | | LSISKDNSKSQVFLKMNSLQTDDTARYYCARDR |
| | | VTATLYAMDYWGQGTSVTVSS |

Humanized antibody C C-H-1 antibody

| | | |
|---|---|---|
| SEQ ID | HC CDR1 | AYGVN |
| NO: 1315 | (Kabat) | |
| SEQ ID | HC CDR2 | MIWGDGNTDYNSALKS |
| NO: 1316 | (Kabat) | |
| SEQ ID | HC CDR3 | DRVTATLYAMDY |
| NO: 1317 | (Kabat) | |
| SEQ ID | HC CDR1 | GFSLTAY |
| NO: 1318 | (Chothia) | |
| SEQ ID | HC CDR2 | WGDGN |
| NO: 1319 | (Chothia) | |
| SEQ ID | HC CDR3 | DRVTATLYAMDY |
| NO: 1317 | (Chothia) | |
| SEQ ID | HC CDR1 | GFSLTAYGVN |
| NO: 1320 | (Combined) | |
| SEQ ID | HC CDR2 | MIWGDGNTDYNSALKS |
| NO: 1316 | (Combined) | |
| SEQ ID | HC CDR3 | DRVTATLYAMDY |
| NO: 1317 | (Combined) | |
| SEQ ID | LC CDR1 | SASQGISNYLN |
| NO: 1321 | (Kabat) | |
| SEQ ID | LC CDR2 | YTSSLHS |
| NO: 1322 | (Kabat) | |
| SEQ ID | LC CDR3 | QQYSKLPRT |
| NO: 1323 | (Kabat) | |
| SEQ ID | LC CDR1 | SASQGISNYLN |
| NO: 1321 | (Chothia) | |
| SEQ ID | LC CDR2 | YTSSLHS |
| NO: 1322 | (Chothia) | |
| SEQ ID | LC CDR3 | QQYSKLPRT |
| NO: 1323 | (Chothia) | |
| SEQ ID | LC CDR1 | SASQGISNYLN |
| NO: 1321 | (Combined) | |
| SEQ ID | LC CDR2 | YTSSLHS |
| NO: 1322 | (Combined) | |
| SEQ ID | LC CDR3 | QQYSKLPRT |
| NO: 1323 | (Contained) | |
| SEQ ID | VL | DIQMTQSPSSLSASVGDRVTITCSASQGISNYLNW |
| NO: 1324 | | YQQTPGKAPKLLIYYTSSLHSGVPSRFSGSGSGTD |
| | | YTFTISSLQPEDIATYYCQQYSKLPRTFGQGTKLQI |
| | | T |
| SEQ ID | VH | QVQLQESGPGLVRPSQTLSLTCTVSGFSLTAYGV |
| NO: 1325 | | |
| | | NWVRQPPGRGLEWLGMIWGDGNTDYNSALKSR |
| | | VTMLKDTSKNQFSLRLSSVTAADTAVYYCARDR |
| | | VTATLYAMDYW GQGSLVTVSS |

Humanized antibody C Variable light chain (VL)

| | | | |
|---|---|---|---|
| SEQ ID | VL | C-H-VL.1 | DIQMTQSPSFLSASVGDRVTITCSASQGISNYLNWYQQ |
| NO: 3000 | | | KPGKAVKLLIYYTSSLHSGVPSRFSGSGSGTEYTLTISS |
| | | | LQPEDFATYYCQQYSKLPRTFGGGTKVEIK |
| SEQ ID | VL | C-H-VL.2 | DIQMTQSPSSLSASVGDRVTITCSASQGISNYLNWYQQ |
| NO: 3001 | | | KPGKAVKLLIYYTSSLHSGVPSRFSGSGSGTDYTLTISS |
| | | | LQPEDFATYYCQQYSKLPRTFGGGTKVEIK |
| SEQ ID | VL | C-H-VL.3 | DIQMTQSPSSLSASVGDRVTITCSASQGISNYLNWYQQ |
| NO: 3002 | | | KPGKVVKLLIYYTSSLHSGVPSRFSGSGSGTDYTLTISS |
| | | | LQPEDVATYYCQQYSKLPRTFGGGTKVEIK |
| SEQ ID | VL | C-H-VL.4 | DIQMTQSPSSLSASVGDRVTITCSASQGISNYLNWYQQ |
| NO: 3003 | | | KPGQAVKLLIYYTSSLHSGVPSRFSGSGSGTDYTLTISS |
| | | | LQPEDVATYYCQQYSKLPRTFGGGTKVEIK |
| SEQ ID | VL | C-H-VL.5 | DIQMTQSPSSLSASVGDRVTITCSASQGISNYLNWYQQ |
| NO: 3004 | | | KPGKAVKLLIYYTSSLHSGVPSRFSGSGSGTDYTFTISS |
| | | | LQPEDIATYYCQQYSKLPRTFGGGTKVEIK |
| SEQ ID | VL | C-H-VL.6 | DIQMTQSPSSLSASVGDRVTITCSASQGISNYLNWYQQ |
| NO: 3005 | | | KPGKTVKLLIYYTSSLHSGIPSRFSGSGSGTDYTLTIRSL |
| | | | QPEDFATYYCQQYSKLPRTFGGGTKVEIK |
| SEQ ID | VL | C-H-VL.7 | AIQMTQSPSSLSASVGDRVTITCSASQGISNYLNWYQQ |
| NO: 3006 | | | KPGKAVKLLIYYTSSLHSGVPSRFSGSGSGTDYTLTISS |
| | | | LQPEDFATYYCQQYSKLPRTFGGGTKVEIK |
| SEQ ID | VL | C-H-VL.8 | DIQMTQSPSSVSASVGDRVTITCSASQGISNYLNWYQQ |
| NO: 3007 | | | KPGKAVKLLIYYTSSLHSGVPSRFSGSGSGTDYTLTISS |
| | | | LQPEDFATYYCQQYSKLPRTFGGGTKVEIK |
| SEQ ID | VL | C-H-VL.9 | DIQMTQSPSSLSASVGDRVTITCSASQGISNYLNWYQQ |
| NO: 3008 | | | KPGKAVKRLIYYTSSLHSGVPSRFSGSGSGTEYTLTISN |
| | | | LQPEDFATYYCQQYSKLPRTFGGGTKVEIK |
| SEQ ID | VL | C-H-VL.10 | AIRMTQSPFSLSASVGDRVTITCSASQGISNYLNWYQQ |
| NO: 3009 | | | KPAKAVKLFIYYTSSLHSGVPSRFSGSGSGTDYTLTISS |
| | | | LQPEDFATYYCQQYSKLPRTFGGGTKVEIK |
| SEQ ID | VL | C-H-VL.11 | DIQMTQSPSSLSASVGDRVTITCSASQGISNYLNWYQQ |
| NO: 3010 | | | KPGKAVKRLIYYTSSLHSGVPSRFSGSGSGTEYTLTISS |
| | | | LQPEDFATYYCQQYSKLPRTFGGGTKVEIK |
| SEQ ID | VL | C-H-VL.12 | DIQMTQSPSTLSASVGDRVTITCSASQGISNYLNWYQQ |
| NO: 3011 | | | KPGKAVKLLIYYTSSLHSGVPSRFSGSGSGTEYTLTISS |
| | | | LQPDDFATYYCQQYSKLPRTFGGGTKVEIK |
| SEQ ID | VL | C-H-VL.13 | DIQMTQSPSSLSASVGDRVTITCSASQGISNYLNWYQQ |
| NO: 3012 | | | KPGKAVKSLIYYTSSLHSGVPSRFSGSGSGTDYTLTISS |
| | | | LQPEDFATYYCQQYSKLPRTFGGGTKVEIK |
| SEQ ID | VL | C-H-VL.14 | DIQMTQSPSSLSASVGDRVTITCSASQGISNYLNWYQQ |
| NO: 3013 | | | KPGKAVKSLIYYTSSLHSGVPSKFSGSGSGTDYTLTISS |
| | | | LQPEDFATYYCQQYSKLPRTFGGGTKVEIK |
| SEQ ID | VL | C-H-VL.15 | DIQMTQSPSSLSASVGDRVTITCSASQGISNYLNWYQQ |
| NO: 3014 | | | KPEKAVKSLIYYTSSLHSGVPSRFSGSGSGTDYTLTISS |
| | | | LQPEDFATYYCQQYSKLPRTFGGGTKVEIK |
| SEQ ID | VL | C-H-VL.16 | DIQMTQSPSAMSASVGDRVTITCSASQGISNYLNWYQ |
| NO: 3015 | | | QKPGKVVKRLIYYTSSLHSGVPSRFSGSGSGTEYTLTIS |
| | | | SLQPEDFATYYCQQYSKLPRTFGGGTKVEIK |
| SEQ ID | VL | C-H-VL.17 | DIVMTQSPDSLAVSLGERATENCSASQGISNYLNWYQQ |
| NO: 3016 | | | KPGQPVKLLIYYTSSLHSGVPDRFSGSGSGTDYTLTISS |
| | | | LQAEDVAVYYCQQYSKLPRTFGGGTKVEIK |
| SEQ ID | VL | C-H-VL.18 | EIVMTQSPGTLSLSPGERATLSCSASQGISNYLNWYQQ |
| NO: 3017 | | | KPGQAVKLLIYYTSSLHSGIPDRFSGSGSGTDYTLTISR |
| | | | LEPEDFAVYYCQQYSKLPRTFGGGTKVEIK |
| SEQ ID | VL | C-H-VL.19 | EIVMTQSPPTLSLSPGERVTLSCSASQGISNYLNWYQQ |
| NO: 3018 | | | KPGQAVKLLIYYTSSLHSGIPARFSGSGSGTDYTLTISS |
| | | | LQPEDFAVYYCQQYSKLPRTFGGGTKVEIK |
| SEQ ID | VL | C-H-VL.20 | EIVMTQSPPTLSLSPGERVTLSCSASQGISNYLNWYQQ |
| NO: 3019 | | | KPGQAVKLLIYYTSSLHSSIPARFSGSGSGTDYTLTISSL |
| | | | QPEDFAVYYCQQYSKLPRTFGGGTKVEIK |
| SEQ ID | VL | C-H-VL.21 | EIVMTQSPATLSLSPGERATLSCSASQGISNYLNWYQQ |
| NO: 3020 | | | KPGQAVKLLIYYTSSLHSGIPARFSGSGSGTDYTLTISS |
| | | | LEPEDFAVYYCQQYSKLPRTFGGGTKVEIK |
| SEQ ID | VL | C-H-VL.22 | EIVMTQSPATLSLSPGERATLSCSASQGISNYLNWYQQ |
| NO: 3021 | | | KPGQAVKLLIYYTSSLHSGIPARFSGSGSGTDYTLTISR |
| | | | LEPEDFAVYYCQQYSKLPRTFGGGTKVEIK |
| SEQ ID | VL | C-H-VL.23 | EIVMTQSPATLSLSPGERATLSCSASQGISNYLNWYQQ |
| NO: 3022 | | | KPGQAVKLLIYYTSSLHSGIPDRFSGSGSGTDYTLTISR |
| | | | LEPEDFAVYYCQQYSKLPRTFGGGTKVEIK |
| SEQ ID | VL | C-H-VL.24 | EIVMTQSPATLSLSPGERATLSCSASQGISNYLNWYQQ |
| NO: 3023 | | | KPGLAVKLLIYYTSSLHSGIPDRFSGSGSGTDYTLTISR |
| | | | LEPEDFAVYYCQQYSKLPRTFGGGTKVEIK |
| SEQ ID | VL | C-H-VL.25 | DIQMIQSPSFLSASVGDRVSIICSASQGISNYLNWYLQK |
| NO: 3024 | | | PGKSVKLFIYYTSSLHSGVSSRFSGRGSGTDYTLTIISLK |
| | | | PEDFAAYYCQQYSKLPRTFGGGTKVEIK |
| SEQ ID | VL | C-H-VL.26 | EIVMTQSPATLSLSPGERATLSCSASQGISNYLNWYQQ |
| NO: 3025 | | | KPGQAVKLLIYYTSSLHSGIPARFSGSGSGTDYTLTISS |
| | | | LQPEDFAVYYCQQYSKLPRTFGGGTKVEIK |
| SEQ ID | VL | C-H-VL.27 | EIVMTQSPATLSLSPGERATLSCSASQGISNYLNWYQQ |
| NO: 3026 | | | KPGQAVKLLIYYTSSLHSGIPARFSGSGPGTDYTLTISS |
| | | | LEPEDFAVYYCQQYSKLPRTFGGGTKVEIK |
| SEQ ID | VL | C-H-VL.28 | DIVMTQTPLSLSVTPGQPASISCSASQGISNYLNWYLQ |
| NO: 3027 | | | KPGQSVKLLIYYTSSLHSGVPDRFSGSGSGTDYTLKISR |
| | | | VEAEDVGVYYCQQYSKLPRTFGGGTKVEIK |
| SEQ ID | VL | C-H-VL.29 | DIVMTQTPLSLSVTPGQPASISCSASQGISNYLNWYLQ |
| NO: 3028 | | | KPGQPVKLLIYYTSSLHSGVPDRFSGSGSGTDYTLKISR |
| | | | VEAEDVGVYYCQQYSKLPRTFGGGTKVEIK |
| SEQ ID | VL | C-H-VL.30 | DIVMTQSPAFLSVTPGEKVTITCSASQGISNYLNWYQQ |
| NO: 3029 | | | KPDQAVKLLIYYTSSLHSGVPSRFSGSGSGTDYTFTISS |
| | | | LEAEDAATYYCQQYSKLPRTFGGGTKVEIK |
| SEQ ID | VL | C-H-VL.31 | DIVMTQSPLSLPVTPGEPASISCSASQGISNYLNWYLQK |
| NO: 3030 | | | PGQSVKLLIYYTSSLHSGVPDRFSGSGSGTDYTLKISRV |
| | | | EAEDVGVYYCQQYSKLPRTFGGGTKVEIK |
| SEQ ID | VL | C-H-VL.32 | DIVMTQTPLSLPVTPGEPASISCSASQGISNYLNWYLQK |
| NO: 3031 | | | PGQSVKLLIYYTSSLHSGVPDRFSGSGSGTDYTLKISRV |
| | | | EAEDVGVYYCQQYSKLPRTFGGGTKVEIK |
| SEQ ID | VL | C-H-VL.33 | EIVMTQSPATLSVSPGERATLSCSASQGISNYLNWYQQ |
| NO: 3032 | | | KPGQAVKLLIYYTSSLHSGIPARFSGSGSGTEYTLTISIL |
| | | | QSEDFAVYYCQQYSKLPRTFGGGTKVEIK |
| SEQ ID | VL | C-H-VL.34 | EIVMTQSPATLSVSPGERATLSCSASQGISNYLNWYQQ |
| NO: 3033 | | | KPGQAVKLLIYYTSSLHSGIPARFSGSGSGTEYTLTISSL |
| | | | QSEDFAVYYCQQYSKLPRTFGGGTKVEIK |
| SEQ ID | VL | C-H-VL.35 | DIVMTQSPLSLPVTLGQPASISCSASQGISNYLNWYQQ |
| NO: 3034 | | | RPGQSVKRLIYYTSSLHSGVPDRFSGSGSGTDYTLKISR |
| | | | VEAEDVGVYYCQQYSKLPRTFGGGTKVEIK |
| SEQ ID | VL | C-H-VL.36 | EITMTQSPAFMSATPGDKVNISCSASQGISNYLNWYQQ |
| NO: 3035 | | | KPGEAVKFIIYYTSSLHSGIPPRFSGSGYGTDYTLTINNI |
| | | | ESEDAAYYYCQQYSKLPRTFGGGTKVEIK |
| SEQ ID | VL | C-H-VL.37 | DIVMTQTPLSSPVTLGQPASISCSASQGISNYLNWYQQ |
| NO: 3036 | | | RPGQPVKLLIYYTSSLHSGVPDRFSGSGAGTDYTLKISR |
| | | | VEAEDVGVYYCQQYSKLPRTFGGGTKVEIK |
| SEQ ID | VL | C-H-VL.38 | EIVMTQSPDFQSVTPKEKVTITCSASQGISNYLNWYQQ |
| NO: 3037 | | | KPDQSVKLLIYYTSSLHSGVPSRFSGSGSGTDYTLTINS |
| | | | LEAEDAATYYCQQYSKLPRTFGGGTKVEIK |
| SEQ ID | VL | C-H-VL.39 | EIVMTQTPLSLSITPGEQASISCSASQGISNYLNWYLQK |
| NO: 3038 | | | ARPVVKLLIYYTSSLHSGVPDRFSGSGSGTDYTLKISRV |
| | | | EAEDFGVYYCQQYSKLPRTFGGGTKVEIK |
| SEQ ID | VL | C-H-VL.40 | EIVMTQTPLSLSITPGEQASMSCSASQGISNYLNWYLQ |
| NO: 3039 | | | KARPWKLLIYYTSSLHSGVPDRFSGSGSGTDYTLKISR |
| | | | VEAEDFGVYYCQQYSKLPRTFGGGTKVEIK |

Humanized antibody C Variable HEAVY chain (VH)

| | | | |
|---|---|---|---|
| SEQ ID | VH | C-H-VH.l | QVTLKESGPVLVKPTETLTLTCTVSGFSLTAYGVNWV |
| NO: 3040 | | | RQPPGKALEWLGMIWGDGNTDYNSALKSRLTISKDNS |
| | | | KSQVVLTMTNMDPVDTATYYCARDRVTATLYAMDY |
| | | | WGQGTLVTVSS |
| SEQ ID | VH | C-H-VH.2 | QVTLKESGPALVKPTETLTLTCTVSGFSLTAYGVNWV |
| NO: 3041 | | | RQPPGKALEWLGMIWGDGNTDYNSALKSRLIISKDNS |
| | | | KSQVVLTMTNMDPVDTATYYCARDRVTATLYAMDY |
| | | | WGQGTLVTVSS |
| SEQ ID | VH | C-H-VH.3 | QVTLKESGPALVKPTQTLTLTCTVSGFSLTAYGVNWV |
| NO: 3042 | | | RQPPGKALEWLGMIWGDGNTDYNSALKSRLTISKDNS |
| | | | KSQVVLTMTNMDPVDTATYYCARDRVTATLYAMDY |
| | | | WGQGTLVTVSS |
| SEQ ID | VH | C-H-VH.4 | QVQLQESGPGLVKPSGTLSLTCAVSGFSLTAYGVNWV |
| NO: 3043 | | | RQPPGKGLEWLGMIWGDGNTDYNSALKSRLTISKDNS |
| | | | KSQVSLKLSSVTAADTAVYYCARDRVTATLYAMDYW |
| | | | GQGTLVTVSS |
| SEQ ID | VH | C-H-VH.5 | QVTLKESGPTLVKPTQTLTLTCTVSGFSLTAYGVNWV |
| NO: 3044 | | | RQPPGKALEWLGMIWGDGNTDYNSALKSRLTITKDNS |
| | | | KSQWLTMTNMDPVDTATYYCARDRVTATLYAMDY |
| | | | WGQGTLVTVSS |
| SEQ ID | VH | C-H-VH.6 | QVTLKESGPALVKPTQTLTLTCTVSGFSLTAYGVNWV |
| NO: 3045 | | | RQPPGKALEWLGMIWGDGNTDYNSALKSRLTITKDNS |
| | | | KSQVVLTMTNMDPVDTATYYCARDRVTATLYAMDY |
| | | | WGQGTLVTVSS |
| SEQ ID | VH | C-H-VH.7 | QVQLQESGPGLVKPSQTLSLTCTVSGFSLTAYGVNWV |
| NO: 3046 | | | RQPPGKGLEWLGMIWGDGNTDYNSALKSRLTISKDNS |
| | | | KSQVSLKLSSVTAADTAVYYCARDRVTATLYAMDYW |
| | | | GQGTLVTVSS |
| SEQ ID | VH | C-H-VH.8 | QVQLQESGPGLVKPSETLSLTCTVSGFSLTAYGVNWV |
| NO: 3047 | | | RQPPGKGLEWLGMIWGDGNTDYNSALKSRLTISKDNS |
| | | | KSQVSLKLSSVTAADTAVYYCARDRVTATLYAMDYW |
| | | | GQGTLVTVSS |
| SEQ ID | VH | C-H-VH.9 | QVQLQESGPGLVKPSQTLSLTCAVSGFSLTAYGVNWV |
| NO: 3048 | | | RQPPGKGLEWLGMIWGDGNTDYNSALKSRLTISKDNS |
| | | | KSQVSLKLSSVTAADTAVYYCARDRVTATLYAMDYW |
| | | | GQGTLVTVSS |
| SEQ ID | VH | C-H- | QVQLQESGPGLVKPSDTLSLTCTVSGFSLTAYGVNWV |
| NO: 3049 | | VH.10 | RQPPGKGLEWLGMIWGDGNTDYNSALKSRLTISKDNS |
| | | | KSQVSLKLSSVTAADTAVYYCARDRVTATLYAMDYW |
| | | | GQGTLVTVSS |
| | | C-H- | QVQLQESGPGLVKPSQTLSLTCTVSGFSLTAYGVNWV |
| SEQ ID | VH | VH.11 | RQHPGKGLEWLGMIWGDGNTDYNSALKSRLTISKDN |
| NO: 3050 | | | SKSQVSLKLSSVTAADTAVYYCARDRVTATLYAMDY |
| | | | WGQGTLVTVSS |
| SEQ ID | VH | C-H- | QVQLQESGPGLVKPSQTLSLTCTVSGFSLTAYGVNWV |
| NO: 3051 | | VH.12 | RQPAGKGLEWLGMIWGDGNTDYNSALKSRLTISKDN |
| | | | SKSQVSLKLSSVTAADTAVYYCARDRVTATLYAMDY |
| | | | WGQGTLVTVSS |
| SEQ ID | VH | C-H- | QVQLQESGPGLVKPSQTLSLTCAVSGFSLTAYGVNWV |
| NO: 3052 | | VH.13 | RQPPGKGLEWLGMIWGDGNTDYNSALKSRLTISKDNS |
| | | | KSQVSLKLSSVTAVDTAVYYCARDRVTATLYAMDYW |
| | | | GQGTLVTVSS |
| SEQ ID | VH | C-H- | QVQLQESGPGLVKPSETLSLTCTVSGFSLTAYGVNWV |
| NO: 3053 | | VH.14 | RQPPGKGLEWLGMIWGDGNTDYNSALKSRLTISKDNS |
| | | | KSHVSLKLSSVTAADTAVYYCARDRVTATLYAMDYW |
| | | | GQGTLVTVSS |
| SEQ ID | VH | C-H- | QVQLQESGPGLVKPSETLSLTCAVSGFSLTAYGVNWV |
| NO: 3054 | | VH.15 | RQPPGKGLEWLGMIWGDGNTDYNSALKSRLTISKDNS |
| | | | KSQVSLKLSSVTAADTAVYYCARDRVTATLYAMDYW |
| | | | GQGTLVTVSS |
| SEQ ID | VH | C-H- | QVQLQESGPGLVKPSQTLSLTCAVYGFSLTAYGVNWV |
| NO: 3055 | | VH.16 | RQPPGKGLEWLGMIWGDGNTDYNSALKSRLTISKDNS |
| | | | KSQVSLKLSSVTAADTAVYYCARDRVTATLYAMDYW |
| | | | GQGTLVTVSS |
| SEQ ID | VH | C-H- | RVQLQESGPGLVKPSETLSLTCTVSGFSLTAYGVNWV |
| NO: 3056 | | VH.17 | RQPPGKGLEWLGMIWGDGNTDYNSALKSRLTISKDNS |
| | | | KSQVPLKLSSVTAADTAVYYCARDRVTATLYAMDYW |
| | | | GQGTLVTVSS |
| SEQ ID | VH | C-H- | QVQLQESGPGLVKPSQTLSLTCTVSGFSLTAYGVNWV |
| NO: 3057 | | VH.18 | RQHPGKGLEWLGMIWGDGNTDYNSALKSLLTISKDNS |
| | | | KSQVSLKLSSVTAADTAVYYCARDRVTATLYAMDYW |
| | | | GQGTLVTVSS |
| SEQ ID | VH | C-H- | QVQLQESGPGLVKPSDTLSLTCAVSGFSLTAYGVNWV |
| NO: 3058 | | VH.19 | RQPPGKGLEWLGMIWGDGNTDYNSALKSRLTISKDNS |
| | | | KSQVSLKLSSVTALDTAVYYCARDRVTATLYAMDYW |
| | | | GQGTLVTVSS |
| SEQ ID | VH | C-H- | QVQLQESGPGLVKPSDTLSLTCAVSGFSLTAYGVNWV |
| NO: 3059 | | VH.20 | RQPPGKGLEWLGMIWGDGNTDYNSALKSRLTISKDNS |
| | | | KSQVSLKLSSVTAVDTAVYYCARDRVTATLYAMDYW |
| | | | GQGTLVTVSS |
| SEQ ID | VH | C-H- | QVQLQESGSGLVKPSQTLSLTCAVSGFSLTAYGVNWV |
| NO: 3060 | | VH.21 | RQPPGKGLEWLGMIWGDGNTDYNSALKSRLTISKDNS |
| | | | KSQVSLKLSSVTAADTAVYYCARDRVTATLYAMDYW |
| | | | GQGTLVTVSS |
| SEQ ID | VH | C-H- | EVQLVESGGGLVQPGRSLRLSCTVSGFSLTAYGVNWV |
| NO: 3061 | | VH.22 | RQAPGKGLEWLGMIWGDGNTDYNSALKSRLTISKDN |
| | | | SKSIVYLQMNSLKTEDTAVYYCARDRVTATLYAMDY |
| | | | WGQGTLVTVSS |
| SEQ ID | VH | C-H- | EVQLVESGGGLVQPGPSLRLSCTVSGFSLTAYGVNWV |
| NO: 3062 | | VH.23 | RQAPGKGLEWLGMIWGDGNTDYNSALKSRLTISKDN |
| | | | SKSIVYLQMNSLKTEDTAVYYCARDRVTATLYAMDY |
| | | | WGQGTLVTVSS |
| SEQ ID | VH | C-H- | QVQLQESGSGLVKPSQTLSLTCAVSGFSLTAYGVNWV |
| NO: 3063 | | VH.24 | RQSPGKGLEWLGMIWGDGNTDYNSALKSRLTISKDNS |
| | | | KSQVSLKLSSVTAADTAVYYCARDRVTATLYAMDYW |
| | | | GQGTLVTVSS |
| SEQ ID | VH | C-H- | QVQLQESGPGLVKPSETLSLTCTVSGFSLTAYGVNWV |
| NO: 3064 | | VH.25 | RQPAGKGLEWLGMIWGDGNTDYNSALKSRLTISKDN |
| | | | SKSQVSLKLSSVTAADTAVYYCARDRVTATLYAMDY |
| | | | WGQGTLVTVSS |
| SEQ ID | VH | C-H- | EVQLVESGGGLVKPGRSLRLSCTVSGFSLTAYGVNWV |
| NO: 3065 | | VH.26 | RQAPGKGLEWLGMIWGDGNTDYNSALKSRLTISKDN |
| | | | SKSIVYLQMNSLKTEDTAVYYCARDRVTATLYAMDY |
| | | | WGQGTLVTVSS |
| SEQ ID | VH | C-H- | QVQLQESGPGLVKPSETLSLTCAVYGFSLTAYGVNWV |
| NO: 3066 | | VH.27 | RQPPGKGLEWLGMIWGDGNTDYNSALKSRLTISKDNS |
| | | | KSQVYLKLSSVTAADTAVYYCARDRVTATLYAMDY |
| | | | WGQGTLVTVSS |
| SEQ ID | VH | C-H- | QVQLQESGPGLVKPSDTLSLTCAVSGFSLTAYGVNWV |
| NO: 3067 | | VH.28 | RQPPGKGLEWLGMIWGDGNTDYNSALKSRLTISKDNS |
| | | | KSQVSLKLSSVTAVDTGVYYCARDRVTATLYAMDYW |
| | | | GQGTLVTVSS |
| SEQ ID | VH | C-H- | EVQLVESGGGLVQPGGSLRLSCAVSGFSLTAYGVNWV |
| NO: 3068 | | VH.29 | RQAPGKGLEWLGMIWGDGNTDYNSALKSRLTISKDN |
| | | | SKSSVYLQMNSLKTEDTAVYYCARDRVTATLYAMDY |
| | | | WGQGTLVTVSS |
| SEQ ID | VH | C-H- | EVQLVESGGGLVKPGGSLRLSCAVSGFSLTAYGVNWV |
| NO: 3069 | | VH.30 | RQAPGKGLEWLGMIWGDGNTDYNSALKSRLTISKDN |
| | | | SKSTVYLQMNSLKTEDTAVYTCARDRVTATLYAMDY |
| | | | WGQGTLVTVSS |
| SEQ ID | VH | C-H- | QVQLQQSGPGLVKPSQTLSLTCAVSGFSLTAYGVNWV |
| NO: 3070 | | VH.31 | RQSPSRGLEWLGMIWGDGNTDYNSALKSRLTINKDNS |
| | | | KSQVSLQLNSVTPEDTAVYYCARDRVTATLYAMDYW |
| | | | GQGTLVTVSS |
| SEQ ID | VH | C-H- | QVQLVESGGGLVQPGGSLRLSCSVSGFSLTAYGVNWV |
| NO: 3071 | | VH.32 | RQAPGKGLEWLGMIWGDGNTDYNSALKSRLTISKDN |
| | | | SKSTVYLQMNSLRAEDTAVYYCARDRVTATLYAMDY |
| | | | WGQGTLVTVSS |
| SEQ ID | VH | C-H- | QVQLQQWGAGLLKPSETLSLTCAVYGFSLTAYGVNW |
| NO: 3072 | | VH.33 | VRQPPGKGLEWLGMIWGDGNTDYNSALKSRLTISKD |
| | | | NSKSQVSLKLSSVTAADTAVYYCARDRVTATLYAMD |
| | | | YWGQGTLVTVSS |
| SEQ ID | VH | C-H- | QVQLVESGGGWQPGRSLRLSCAVSGFSLTAYGVNW |
| NO: 3073 | | VH.34 | VRQAPGKGLEWLGMIWGDGNTDYNSALKSRLTISKD |
| | | | NSTSTVFLQMNSLRAEDTAVYYCARDRVTATLYAMD |
| | | | YWGQGTLVTVSS |
| SEQ ID | VH | C-H- | EVQLVESGGGLVQPGGSLRLSCAVSGFSLTAYGVNWV |
| NO: 3074 | | VH.35 | RQAPGKGLEWLGMIWGDGNTDYNSALKSRLTISKDN |
| | | | SKSTVYLQMNSLRAEDTAVYYCARDRVTATLYAMDY |
| | | | WGQGTLVTVSS |
| SEQ ID | VH | C-H- | EVQLVESGGGLVQPGGSLRLSCAVSGFSLTAYGVNWV |
| NO: 3075 | | VH.36 | RQAPGKGLEWLGMIWGDGNTDYNSALKSRLTISKDN |
| | | | AKSSVYLQMNSLRDEDTAVYYCARDRVTATLYAMD |
| | | | YWGQGTLVTVSS |
| SEQ ID | VH | C-H- | EVQLLESGGGLVQPGGSLRLSCAVSGFSLTAYGVNWV |
| NO: 3076 | | VH.37 | RQAPGKGLEWLGMIWGDGNTDYNSALKSRLTISKDN |
| | | | SKSTVYLQMNSLRAEDTAVYYCARDRVTATLYAMDY |
| | | | WGQGTLVTVSS |
| SEQ ID | VH | C-H- | QVQLVESGGGLVKPGGSLRLSCAVSGFSLTAYGVNW |
| NO: 3077 | | VH.38 | VRQAPGKGLEWLGMIWGDGNTDYNSALKSRLTISKD |
| | | | NAKSSVYLQMNSLRAEDTAVYYCARDRVTATLYAM |
| | | | DYWGQGTLVTVSS |
| SEQ ID | VH | C-H- | EVQLVESGGGLVQPGGSLKLSCAVSGFSLTAYGVNW |
| NO: 3078 | | VH.39 | VRQASGKGLEWLGMIWGDGNTDYNSALKSRLTISKD |
| | | | NSKSTVYLQMNSLKTEDTAVYYCARDRVTATLYAMD |
| | | | YWGQGTLVTVSS |
| SEQ ID | VH | C-H- | QVQLLESGGGLVKPGGSLRLSCAVSGFSLTAYGVNWV |
| NO: 3079 | | VH.40 | RQAPGKGLEWLGMIWGDGNTDYNSALKSRLTISKDN |
| | | | AKSSVYLQMNSLRAEDTAVYYCARDRVTATLYAMD |
| | | | YWGQGTLVTVSS |
| SEQ ID | VH | C-H- | QVQLVESGGGVVQPGRSLRLSCAVSGFSLTAYGVNW |
| NO: 3080 | | VH.41 | VRQAPGKGLEWLGMIWGDGNTDYNSALKSRLTISKD |
| | | | NSKSTVYLQMNSLRAEDTAVYYCARDRVTATLYAMD |
| | | | YWGQGTLVTVSS |
| SEQ ID | VH | C-H- | QVQLVESGGGVVQPGRSLRLSCAVSGFSLTAYGVNW |
| NO: 3081 | | VH.42 | VRQAPGKGLEWLGMIWGDGNTDYNSALKSRLTISKD |
| | | | NSKSRVYLQMNSLRAEDTAVYCARDRVTATLYAMD |
| | | | YWGQGTLVTVSS |
| SEQ ID | VH | C-H- | QVQLVESGGGWQPGRSLRLSCAVSGFSLTAYGVNW |
| NO: 3082 | | VH.43 | VRQAPGKGLEWLGMIWGDGNTDYNSALKSRLAISKD |
| | | | NSKSTVYLQMNSLRAEDTAVYYCARDRVTATLYAMD |
| | | | YWGQGTLVTVSS |
| SEQ ID | VH | C-H- | QVQLVESGGGWQPGGSLRLSCAVSGFSLTAYGVNW |
| NO: 3083 | | VH.44 | VRQAPGKGLEWLGMIWGDGNTDYNSALKSRLTISKD |
| | | | NSKSTVYLQMNSLRAEDTA\YYCARDRVTATLYAMD |
| | | | YWGQGTLVTVSS |
| SEQ ID | VH | C-H- | EVQLVESGGGLVQPGGSLRLSCAVSGFSLTAYGVNWV |
| NO: 3084 | | VH.45 | RQAPGKGLEWLGMIWGDGNTDYNSALKSRLTISKDN |
| | | | AKSTVYLQMNSLRAEDTAVYYCARDRVTATLYAMD |
| | | | YWGQGTLVTVSS |
| SEQ ID | VH | C-H- | EVQLVESGGGLVQPGGSLRLSCAVSGFSLTAYGVNWV |
| NO: 3085 | | VH.46 | RQAPGKGLEWLGMIWGDGNTDYNSALKSRLTISKDN |
| | | | AKSSVYLQMNSLRAEDTAVYYCARDRVTATLYAMD |
| | | | YWGQGTLVTVSS |
| SEQ ID | VH | C-H- | EVQLVESGGVVVQPGGSLRLSCAVSGFSLTAYGVNW |
| NO: 3086 | | VH.47 | VRQAPGKGLEWLGMIWGDGNTDYNSALKSRLTISKD |
| | | | NSKSSVYLQMNSLRTEDTALYYCARDRVTATLYAMD |
| | | | YWGQGTLVTVSS |
| SEQ ID | VH | C-H- | EVQLVESGGGLVQPGGSLRLSCAVSGFSLTAYGVNWV |
| NO: 3087 | | VH.48 | RQAPGKGLEWLGMIWGDGNTDYNSALKSRLTISKHN |
| | | | SKSTVYLQMNSLRAEDTAVYYCARDRVTATLYAMDY |
| | | | WGQGTLVTVSS |
| SEQ ID | VH | C-H- | EVQLVESGGGLVKPGGSLRLSCAVSGFSLTAYGVNWV |
| NO: 3088 | | VH.49 | RQAPGKGLEWLGMIWGDGNTDYNSALKSRLTISKDN |
| | | | AKSSVYLQMNSLRAEDTAVYYCARDRVTATLYAMD |
| | | | YWGQGTLVTVSS |
| SEQ ID | VH | C-H- | EVQLVESGGGLIQPGGSLRLSCAVSGFSLTAYGVNWV |
| NO: 3089 | | VH.50 | RQPPGKGLEWLGMIWGDGNTDYNSALKSRLTISKDNS |
| | | | KSTVYLQMNSLRAEDTAVYYCARDRVTATLYAMDY |
| | | | WGQGTLVTVSS |

[0856] Exemplary anti-TCRβV5 antibodies of the disclosure are provided in Table 7. In some embodiments, the anti-TCRβV5 is antibody E, e.g., humanized antibody E (antibody E-H), as provided in Table 7. In some embodiments, the anti-TCRβV antibody comprises one or more (e.g., all three) of a LC CDR1, LC CDR2, and LC CDR3 provided in Table 7; and/or one or more (e.g., all three) of a HC CDR1, HC CDR2, and HC CDR3 provided in Table 7, or a sequence with at least 95% identity thereto. In some embodiments, antibody E comprises a variable heavy chain (VH) and/or a variable light chain (VL) provided in Table 7, or a sequence with at least 95% identity thereto.

[0857] In some embodiments, antibody E comprises a heavy chain comprising the amino acid sequence of SEQ ID NO: 3284 and/or a light chain comprising the amino acid sequence of SEQ ID NO: 3285, or sequence with at least 95% identity thereto.

TABLE 7
Amino acid sequences for anti
TCRβ V5 antibodies
Amino acid and nucleotide sequences for
murine and humanized antibody molecules
which bind to TCRVB 5 (e.g., TCRVB 5-5
or TCRVB 5-6). The amino acid the heavy
and light chain CDRs, and the amino acid
and nucleotide sequences of the heavy
and light chain variable regions, and
the heavy and light chains are shown.
Murine antibody E

SSWMN

| | | |
|---|---|---|
| SEQ ID | HC CDR1 | |
| NO: 1298 | (Rabat) | |
| SEQ ID | HC CDR2 | RIYPGDGDT |
| NO: 1299 | (Rabat) | RYNGRFRG |
| SEQ ID | HC CDR3 | RGTGGWYFDV |
| NO: 1300 | (Rabat) | |
| SEQ ID | HC CDR1 | GYAFSSS |
| NO: 1302 | (Chothia) | |
| SEQ ID | HC CDR2 | YPGDGD |
| NO: 1303 | (Chothia) | |
| SEQ ID | HC CDR3 | RGTGGWYFDV |
| NO: 1301 | (Chothia) | |
| SEQ ID | HC CDR1 | GYAFSSSWMN |
| NO: 1304 | (Combined) | |
| SEQ ID | HC CDR2 | RIYPGDGDTR |
| NO: 1299 | (Combined) | YNGRFRG |
| SEQ ID | HC CDR3 | RGTGGWYFDV |
| NO: 1301 | (Combined) | |
| SEO ID | LC CDR1 | RASESVDSS |
| NO: 1305 | (Rabat) | GNSFMH |
| SEQ ID | LC CDR2 | RASNLES |
| NO: 1306 | (Rabat) | |
| SEQ ID | LC CDR3 | QQSFDDPFT |
| NO: 1307 | (Rabat) | |
| SEQ ID | LC CDR1 | SESVDSSGNSF |
| NO: 1308 | (Chothia) | |
| SEQ ID | LC CDR2 | RASNLES |
| NO: 1306 | (Chothia) | |
| SEQ ID | LC CDR3 | QQSFDDPFT |
| NO: 1307 | (Chothia) | |
| SEQ ID | LC CDR1 | RASESVDSSGNSFMH |
| NO: 1305 | (Combined) | |
| SEQ ID | LC CDR2 | RASNLES |
| NO: 1306 | (Combined) | |
| SEQ ID | LC CDR3 | QQSFDDPFT |
| NO: 1307 | (Combined) | |
| SEQ ID | VH | QVQLQQSGPELVKPGASVK |
| NO: 3091 | | ISCKASGYAFSSSWMNWVK |
| | | QRPGQGLEWIGRIYPGDGD |
| | | TKYNGKFKGKATLTADKSS |
| | | STAYMHLSSLTSVDSAVYF |
| | | CARRGTGGWYFDVWGAGTT |
| | | VTVSS |
| SEQ ID | Heavy | METDTLLLWVLLLWVPGST |
| NO: 3284 | chain | GQVQLQQSGPELVKPGASV |
| | | KISCKASGYAFSSSWMNWV |
| | | KQRPGQGLEWIGRIYPGDG |
| | | DTKYNGKFKGKATLTADKS |
| | | SSTAYMHLSSLTSVDSAVY |
| | | FCARRGTGGWYFDVWGAGT |
| | | TVTVSSAKTTAPSVYPLAP |
| | | VCGDTTGSSVTLGCLVKGY |
| | | FPEPVTLTWNSGSLSSGVH |
| | | TFPAVLQSDLYTLSSSVTV |
| | | TSSTWPSQS1TCNVAHPAS |
| | | STKVDKKIEPRGPTIKPCP |
| | | PCKCPAPNLLGGPSVFIFP |
| | | PKIKDVLMISLSPIVTCVV |
| | | VDVSEDDPDVQISWFVNNV |
| | | EVHTAQTQTHREDYNSTLR |
| | | VVSALPIQHQDWMSGKEFK |
| | | CKVNNKDLPAPIERTISKP |
| | | KGSVRAPQVYVLPPPEEEM |
| | | TKKQVTLTCMVTDFMPEDI |
| | | YVEWTNNGKTELNYKNTEP |
| | | VLDSDGSYFMYSKLRVEKK |
| | | NWVERNSYSCSVVHEGLHN |
| | | HHTTKSFSRTPGK |
| SEQ ID | VL | DIVLTQSPASLAVSLGQRA |
| NO: 3092 | | TISCRASESVDSSGNSFMH |
| | | WYQQKPGQPPQLLIYRASN |
| | | LESGIPARFSGSGSRTDFT |
| | | LTINPVEADDVATFYCQQS |
| | | FDDPFTFGSGTKLEIK |
| SEQ ID | Light | METDTLLLWVLLLWVPGST |
| NO: 3285 | chain | GDIVLTQSPASLAVSLGQR |
| | | ATISCRASESVDSSGNSFM |
| | | HWYQQKPGQPPQLLIYRAS |
| | | NLESGIPARFSGSGSRTDF |
| | | TLTINPVEADDVATFYCQQ |
| | | SFDDPFTFGSGTKLEIKRA |
| | | DAAPTVSIFPPSSEQLTSG |
| | | GASVVCFLNNFYPKDINVK |
| | | WKIDGSERQNGVLNSWTDQ |
| | | DSKDSTYSMSSTLTLTKDE |
| | | YERHNSYTCEATHKTSTSP |
| | | IVKSFNRNEC |

Humanized antibody E (E-H antibody)
Variable light chain (VL)

| | | | |
|---|---|---|---|
| SEQ ID | VL | E-H.1 | DIVLTQSPDSLAVSLGE |
| NO: 3093 | | | RATINCRASESVDSSGN |
| | | | SFMHWYQQKPGQPPQLL |
| | | | IYRASNLESGVPDRFSG |
| | | | SGSRTDFTLTISSLQAE |
| | | | DVAVYYCQQSFDDPFTF |
| | | | GQGTKLEIK |
| SEQ ID | VL | E-H.2 | EIVLTQSPATLSLSPGE |
| NO: 3094 | | | RATLSCRASESVDSSGN |
| | | | SFMHWYQQKPGQAPQLL |
| | | | IYRASNLESGIPARFSG |
| | | | SGSRTDFTLTISSLEPE |
| | | | DFAVYYCQQSFDDPFTF |
| | | | GQGTKLEIK |
| SEQ ID | VL | E-H.3 | EIVLTQSPATLSLSPG |
| NO: 3095 | | | ERATLSCRASESVDSS |
| | | | GNSFMHWYQQKPGQAP |
| | | | QLLIYRASNLESGIPA |
| | | | RFSGS |
| | | | GSRTDFTLTISRLE |
| | | | PEDFAVYYCQQSFD |
| | | | DPFTFGQGTKLEIK |
| SEQ ID | VL | E-H.4 | EIVLTQSPATLSLS |
| NO: 3096 | | | PGERATLSCRASES |
| | | | VDSSGNSFMHWYQQ |
| | | | KPGQAPQLLIYRAS |
| | | | NLESGIPARFSGSG |
| | | | SRTDFTLTISSLQP |
| | | | EDFAVYYCQQSFDD |
| | | | PFTFGQGTKLEIK |
| SEQ ID | VL | E-H.5 | DIQLTQSPSSLSAS |
| NO: 3097 | | | VGDRVTITCRASES |
| | | | VDSSGNSFMHWYQQ |
| | | | KPGQAPQLLIYRAS |
| | | | NLESGVPSRFSGSG |
| | | | SRTDFTLTISSLQP |
| | | | EDVATYYCQQSFDD |
| | | | PFTFGQGTKLEIK |
| SEQ ID | VL | E-H.6 | EIVLTQSPATLSLS |
| NO: 3098 | | | PGERATLSCRASES |
| | | | VDSSGNSFMHWYQQ |
| | | | KPGQAPQLLIYRAS |
| | | | NLESGIPARFSGSG |
| | | | PRTDFTLTISSLEP |
| | | | EDFAVYYCQQSFDD |
| | | | PFTFGQGTKLEIK |
| SEQ ID | VL | E-H.7 | EIVLTQSPATLSLS |
| NO: 3099 | | | PGERATLSCRASES |
| | | | VDSSGNSFMHWYQQ |
| | | | KPGQAPQLLIYRAS |
| | | | NLESGIPDRFSGSG |
| | | | SRTDFTLTISRLEP |
| | | | EDFAVYYCQQSFDD |
| | | | PFTFGQGTKLEIK |
| SEQ ID | VL | E-H.8 | DIQLTQSPSSLSAS |
| NO: 3100 | | | VGDRVTITCRASES |
| | | | VDSSGNSFMHWYQQ |
| | | | KPGKVPQLLIYRAS |
| | | | NLESGVPSRFSGSG |
| | | | SRTDFTLTISSLQP |
| | | | EDVATYYCQOSFDD |
| | | | PFTFGQGTKLEIK |
| SEQ ID | VL | E-H.9 | DIQLTQSPSSLSAS |
| NO: 3101 | | | VGDRVTITCRASES |
| | | | VDSSGNSFMHWYQQ |
| | | | KPGKTPQLLIYRAS |
| | | | NLESGIPSRFSGSG |
| | | | SRTDFTLTIRSLQP |
| | | | EDFATYYCQQSFDD |
| | | | PFTFGQGTKLEIK |
| SEQ ID | VL | E-H.10 | EIVLTQSPGTLSLS |
| NO: 3102 | | | PGERATLSCRASES |
| | | | VDSSGNSFMHWYQQ |
| | | | KPGQAPQLLIYRAS |
| | | | NLESGIPDRFSGSG |
| | | | SRTDFTLTISRLEP |
| | | | EDFAVYYCQQSFDD |
| | | | PFTFGQGTKLEIK |
| SEQ ID | VL | E-H.11 | EIVLTQSPATLSLS |
| NO: 3103 | | | PGERATLSCRASES |
| | | | VDSSGNSFMHWYQQ |
| | | | KPGLAPQLLIYRAS |
| | | | NLESGIPDRFSGSG |
| | | | SRTDFTLTISRLEP |
| | | | EDFAVYYCQQSFDD |
| | | | PFTFGQGTKLEIK |
| SEQ ID | VL | E-H.12 | DIQLTQSPSSLSAS |
| NO: 3104 | | | VGDRVTITCRASES |
| | | | VDSSGNSFMHWYQQ |
| | | | KPGKAPQLLIYRAS |
| | | | NLESGVPSRFSGSG |
| | | | SRTDFTLTISSLQP |
| | | | EDFATYYCQQSFDD |
| | | | PFTFGQGTKLEIK |
| SEQ ID | VL | E-H.13 | DIQLTQSPSSVSA |
| NO: 3105 | | | SVGDRVTITCRAS |
| | | | ESVDSSGNSFMHW |
| | | | YQQKPGKAPQLLI |
| | | | YRASNLESGVPSR |
| | | | FSGSGSRTDFTLT |
| | | | ISSLQPEDFATYY |
| | | | CQQSFDDPFTFGQ |
| | | | GTKLEIK |
| SEQ ID | VL | E-H.14 | AIQLTQSPSSLSA |
| NO: 3106 | | | SVGDRVTITCRAS |
| | | | ESVDSSGNSFMHW |
| | | | YQQKPGKAPQLLI |
| | | | YRASNLESGVPSR |
| | | | FSGSGSRTDFTLT |
| | | | ISSLQPEDFATYY |
| | | | CQQSFDDPFTFGQ |
| | | | GTKLEIK |
| SEQ ID | VL | E-H.15 | DIQLTQSPSFLSA |
| NO: 3107 | | | SVGDRVTITCRAS |
| | | | ESVDSSGNSFMHW |
| | | | YQQKPGKAPQLLI |
| | | | YRASNLESGVPSR |
| | | | FSGSGSRTEFTLT |
| | | | ISSLQPEDFATYY |
| | | | CQQSFDDPFTFGQ |
| | | | GTKLEIK |
| SEQ ID | VL | E-H.16 | DIQLTQSPSSLSASV |
| NO: 3108 | | | GDRVTITCRASESVD |
| | | | SSGNSFMHWYQQKPG |
| | | | KAPQLLIYRASNLES |
| | | | GVPSRFSGSGSRTDF |
| | | | TFTISSLQPEDIATY |
| | | | YCQQSFDDPFTFGQG |
| | | | TKLEIK |
| SEQ ID | VL | E-H.17 | EIVLTQSPATLSVSP |
| NO: 3109 | | | GERATLSCRASESVD |
| | | | SSGNSFMHWYQQKPG |
| | | | QAPQLLIYRASNLES |
| | | | GIPARFSGSGSRTEF |
| | | | TLTISILQSEDFAVY |
| | | | YCQQSFDDPFTFGQG |
| | | | TKLEIK |
| SEQ ID | VL | E-H.18 | EIVLTQSPATLSVSP |
| NO: 3110 | | | GERATLSCRASESVD |
| | | | SSGNSFMHWYQQKPG |
| | | | QAPQLLIYRASNLES |
| | | | GIPARFSGSGSRTEF |
| | | | TLTISSLOSEDFAVY |
| | | | YCQQSFDDPFTFGQG |
| | | | TKLEIK |
| SEQ ID | VL | E-H.19 | AIRLTQSPFSLSAS |
| NO: 3111 | | | VGDRVTITCRASES |
| | | | VDSSGNSFMHWYQQ |
| | | | KPAKAPQLFIYRAS |
| | | | NLESGVPSRFSGSG |
| | | | SRTDFTLTISSLQP |
| | | | EDFATYYCQQSFDD |
| | | | PFTFGQGTKLEIK |
| SEQ ID | VL | E-H.20 | DIQLTQSPSSLSAS |
| NO: 3112 | | | VGDRVTITCRASES |
| | | | VDSSGNSFMHWYQQ |
| | | | KPGKAPQSLIYRAS |
| | | | NLESGVPSRFSGSG |
| | | | SRTDFTLTISSLQP |
| | | | EDFATYYCQQSFDD |
| | | | PFTFGQGTKLEIK |
| SEQ ID | VL | E-H.21 | DIQLTQSPSSLSAS |
| NO: 3113 | | | VGDRVTITCRASES |
| | | | VDSSGNSFMHWYQQ |
| | | | KPGKAPQRLIYRAS |
| | | | NLESGVPSRFSGSG |
| | | | SRTEFTLTISNLQP |
| | | | EDFATYYCQQSFDD |
| | | | PFTFGQGTKLEIK |
| SEQ ID | VL | E-H.22 | DIQLTQSPSTLSAS |
| NO: 3114 | | | VGDRVTITCRASES |
| | | | VDSSGNSFMHWYQQ |
| | | | KPGKAPQLLIYRAS |
| | | | NLESGVPSRFSGSG |
| | | | SRTEFTLTISSLQP |
| | | | DDFATYYCQQSFDD |
| | | | PFTFGQGTKLEIK |
| SEQ ID | VL | E-H.23 | EIVLTQSPDFQSVT |
| NO: 3115 | | | PKEKVTITCRASES |
| | | | VDSSGNSFMHWYQQ |
| | | | KPDQSPQLLIYRAS |
| | | | NLESGVPSRFSGSG |
| | | | SRTDFTLTINSLEA |
| | | | EDAATYYCQQSFDD |
| | | | PFTFGQGTKLEIK |
| SEQ ID | VL | E-H.24 | DIQLTQSPSSLSAS |
| NO: 3116 | | | VGDRVTITCRASES |
| | | | VDSSGNSFMHWYQQ |
| | | | KPGKAPQSLIYRAS |
| | | | NLESGVPSKFSGSG |
| | | | SRTDFTLTISSLQP |
| | | | EDFATYYCQQSFDD |
| | | | PFTFGQGTKLEIK |
| SEQ ID | VL | E-H.25 | DIQLTQSPSSLSAS |
| NO: 3117 | | | VGDRVTITCRASES |
| | | | VDSSGNSFMHWYQQ |
| | | | KPGKAPQRLIYRAS |
| | | | NLESGVPSRFSGSG |
| | | | SRTEFTLTISSLQP |
| | | | EDFATYYCQQSFDD |
| | | | PFTFGQGTKLEIK |
| SEQ ID | VL | E-H.26 | DIVLTQTPLSLSVT |
| NO: 3118 | | | PGQPASISCRASES |
| | | | VDSSGNSFMHWYLQ |
| | | | KPGQPPQLLIYRAS |
| | | | NLESGVPDRFSGSG |
| | | | SRTDFTLKISRVEA |
| | | | EDVGVYYCQQSFDD |
| | | | PFTFGQGTKLEIK |
| SEQ ID | VL | E-H.27 | DIQLTQSPSSLSAS |
| NO: 3119 | | | VGDRVTITCRASFS |
| | | | VDSSGNSFMHWYQQ |
| | | | KPEKAPQSLIYRAS |
| | | | NLESGVPSRFSGSG |
| | | | SRTDFTLTISSLQP |
| | | | EDFATYYCQQSFDD |
| | | | PFTFGQGTKLEIK |
| SEQ ID | VL | E-H.28 | EIVLTQSPPTLSLS |
| NO: 3120 | | | PGERVTLSCRASES |
| | | | VDSSGNSFMHWYQQ |
| | | | KPGQAPQLLIYRAS |
| | | | NLESGIPARFSGSG |
| | | | SRTDFTLTISSLQP |
| | | | EDFAVYYCQQSFDD |
| | | | PFTFGQGTKLEIK |
| SEQ ID | VL | E-H.29 | DIQLTQSPSAMSA |
| NO: 3121 | | | SVGDRVTITCRAS |
| | | | ESVDSSGNSFMHW |
| | | | YQQKPGKVPQRLI |
| | | | YRASNLESGVPSR |
| | | | FSGSGSRTEFTLT |
| | | | ISSLQPEDFATYY |
| | | | CQQSFDDPFTFGQ |
| | | | GTKLEIK |
| SEQ ID | VL | E-H.30 | DIVLTQSPLSLPV |
| NO: 3122 | | | TPGEPASISCRAS |
| | | | ESVDSSGNSFMHW |
| | | | YLQKPGQSPQLLI |
| | | | YRASNLESGVPDR |
| | | | FSGSGSRTDFTLK |
| | | | ISRVEAEDVGVYY |
| | | | CQQSFDDPFTFGQ |
| | | | GTKLEIK |
| SEQ ID | VL | E-H.31 | DIVLTQTPLSLPV |
| NO: 3123 | | | TPGEPASISCRAS |
| | | | ESVDSSGNSFMHW |
| | | | YLQKPGQSPQLLI |
| | | | YRASNLESGVPDR |
| | | | FSGSGSRTDFTLK |
| | | | ISRVEAEDVGVYY |
| | | | CQQSFDDPFTFGQ |
| | | | GTKLEIK |
| SEQ ID | VL | E-H.32 | DIVLTQTPLSLSV |
| NO: 3124 | | | TPGQPASISCRAS |
| | | | ESVDSSGNSFMHW |
| | | | YLQKPGQSPQLLI |
| | | | YRASNLESGVPDR |
| | | | FSGSGSRTDFTLK |
| | | | ISRVEAEDVGVYY |
| | | | CQQSFDDPFTFGQ |
| | | | GTKLEIK |
| SEQ ID | VL | E-H.33 | EIVLTQSPPTLSL |
| NO: 3125 | | | SPGERVTLSCRAS |
| | | | ESVDSSGNSFMHW |
| | | | YQQKPGQAPQLLI |
| | | | YRASNLESSIPAR |
| | | | FSGSGSRTDFTLT |
| | | | ISSLQPEDFAVYY |
| | | | CQQSFDDPFTFGQ |
| | | | GTKLEIK |
| SEQ ID | VL | E-H.34 | DIVLTQSPLSLPV |
| NO: 3126 | | | TLGQPASISCRAS |
| | | | ESVDSSGNSFMHW |
| | | | YQQKPGQSPQRLI |
| | | | YRASNLESGVPDR |
| | | | FSGSGSRTDFTLK |
| | | | ISRVEAEDVGVYY |
| | | | CQQSFDDPFTFGQ |
| | | | GTKLEIK |
| SEQ ID | VL | E-H.35 | DIVLTQTPLSSPV |
| NO: 3127 | | | TLGQPASISCRAS |
| | | | ESVDSSGNSFMHW |
| | | | YQQKPGQPPQLLI |
| | | | YRASNLESGVPDR |
| | | | FSGSGARTDFTLK |
| | | | ISRVEAEDVGVYY |
| | | | CQQSFDDPFTFGQ |
| | | | GTKLEIK |
| SEQ ID | VL | E-H.36 | DIVLTQSPAFLSV |
| NO: 3128 | | | TPGEKVTITCRAS |
| | | | ESVDSSGNSFMHW |
| | | | YQQKPDQAPQLLI |
| | | | YRASNLESGVPSR |
| | | | FSGSGSRTDFTFT |
| | | | ISSLEAEDAATYY |
| | | | CQQSFDDPFTFGQ |
| | | | GTKLEIK |
| SEQ ID | VL | E-H.37 | DIQLIQSPSFLSA |
| NO: 3129 | | | SVGDRVSIICRAS |
| | | | ESVDSSGNSFMHW |
| | | | YLQKPGKSPQLFI |
| | | | YRASNLESGVSSR |
| | | | FSGRGSRTDFTLT |
| | | | IISLKPEDFAAYY |
| | | | CQQSFDDPFTFGQ |
| | | | GTKLEIK |
| SEQ ID | VL | E-H.38 | EIVLTQTPLSLSI |
| NO: 3130 | | | TPGEQASISCRAS |
| | | | ESVDSSGNSFMHW |
| | | | YLQKARPVPQLLI |
| | | | YRASNLESGVPDR |
| | | | FSGSGSRTDFTLK |
| | | | ISRVEAEDFGVYY |
| | | | CQQSFDDPFTFGQ |
| | | | GTKLEIK |
| SEQ ID | VL | E-H.39 | EIVLTQTPLSLSI |
| NO: 3131 | | | TPGEQASMSCRAS |
| | | | ESVDSSGNSFMHW |
| | | | YLQKARPVPQLLI |
| | | | YRASNLESGVPDR |
| | | | FSGSGSRTDFTLK |
| | | | ISRVEAEDFGVYY |
| | | | CQQSFDDPFTFGQ |
| | | | GTKLEIK |
| SEQ ID | VL | E-H.40 | EITLTQSPAFMSA |
| NO: 3132 | | | TPGDKVNISCRAS |
| | | | ESVDSSGNSFMHW |
| | | | YQQKPGEAPQFII |
| | | | YRASNLESGIPPR |
| | | | FSGSGYRTDFTLT |
| | | | INNIESEDAAYYY |
| | | | CQQSFDDPFTFGQ |
| | | | GTKLEIK |

Variable HEAVY chain (VH)

| | | | |
|---|---|---|---|
| SEQ ID | VH | E-H.1 | QVQLVQSGAEVKKP |
| NO: 3133 | | | GASVKVSCKASGYA |
| | | | FSSSWMNWVRQAPG |
| | | | QGLEWIGRIYPGDG |
| | | | DTKYNGKFKGRATL |
| | | | TADKSTSTAYMELS |
| | | | SLRSEDTAVYYCAR |
| | | | RGTGGWYFDVWGQG |
| | | | TTVTVSS |
| SEQ ID | VH | E-H.2 | QVQLVQSGAEVKKP |
| NO: 3134 | | | GSSVKVSCKASGYA |
| | | | FSSSWMNWVRQAPG |
| | | | QGLEWIGRIYPGDG |
| | | | DTKYNGKFKGRATL |
| | | | TADKSTSTAYMELS |
| | | | SLRSEDTAVYYCAR |
| | | | RGTGGWYFDVWGQG |
| | | | TTVTVSS |
| SEQ ID | VH | E-H.3 | QVQLVQSGAEVKKP |
| NO: 3135 | | | GASVKVSCKASGYA |
| | | | FSSSWMNWVRQAPG |
| | | | KGLEWIGRIYPGDG |
| | | | DTKYNGKFKGRATL |
| | | | TADKSTSTAYMELS |
| | | | SLRSEDTAVYYCAR |
| | | | RGTGGWYFDVWGQG |
| | | | TTVTVSS |
| SEQ ID | VH | E-H.4 | QVQLVQSGAEVKKP |
| NO: 3136 | | | GASVKVSCKASGYA |
| | | | FSSSWMNWVRQAPG |
| | | | QELEWIGRIYPGDG |
| | | | DTKYNGKFKGRATL |
| | | | TADKSISTAYMELS |
| | | | SLRSEDTATYYCAR |
| | | | RGTGGWYFDVWGQG |
| | | | TTVTVSS |
| SEQ ID | VH | E-H.5 | EVQLVQSGAEVKKP |
| NO: 3137 | | | GATVKISCKASGYA |
| | | | FSSSWMNWVQQAPG |
| | | | KGLEWIGRIYPGDG |
| | | | DTKYNGKFKGRATL |
| | | | TADKSTSTAYMELS |
| | | | SLRSEDTAVYYCAR |
| | | | RGTGGWYFDVWGQG |
| | | | TTVTVSS |
| SEQ ID | VH | E-H.6 | QVQLVQSGAEVKKT |
| NO: 3138 | | | GSSVKVSCKASGYA |
| | | | FSSSWMNWVRQAPG |
| | | | QALEWIGRIYPGDG |
| | | | DTKYNGKFKGRATL |
| | | | TADKSMSTAYMELS |
| | | | SLRSEDTAMYYCAR |
| | | | RGTGGWYFDVWGQG |
| | | | TTVTVSS |
| SEQ ID | VH | E-H.7 | QVQLVQSGAEVKKP |
| NO: 3139 | | | GASVKVSCKASGYA |
| | | | FSSSWMNWVRQAPG |
| | | | QRLEW1GRIYPGDG |
| | | | DTKYNGKFKGRATL |
| | | | TADKSASTAYMELS |
| | | | SLRSEDMAVYYCAR |
| | | | RGTGGWYFDVWGQG |
| | | | TTVTVSS |
| SEQ ID | VH | E-H.8 | QVQLVQSGAEVKKP |
| NO: 3140 | | | GASVKVSCKASGYA |
| | | | FSSSWMNWVRQAPG |
| | | | QGLEWIGRIYPGDG |
| | | | DTKYNGKFKGRATL |
| | | | TADKSTSTAYMELR |
| | | | SLRSDDMAVYYCAR |
| | | | RGTGGWYFDVWGQG |
| | | | TFVTVSS |
| SEQ ID | VH | E-H.9 | QVQLVQSGAEVKKP |
| NO: 3141 | | | GASVKVSCKASGYA |
| | | | FSSSWMNWVRQAPG |
| | | | QRLEWIGRIYPGDG |
| | | | DTKYNGKFKGRATL |
| | | | TADKSASTAYMELS |
| | | | SLRSEDTAVYYCAR |
| | | | RGTGGWYFDVWGQG |
| | | | TTVTVSS |
| SEQ ID | VH | E-H.10 | QVQLVQSGAEVKKP |
| NO: 3142 | | | GASVKVSCKASGYA |
| | | | FSSSWMNWVRQAPG |
| | | | QGLEWIGRIYPGDG |
| | | | DTKYNGKFKGRATL |
| | | | TADKSTSTAYMELR |
| | | | SLRSDDTAVYYCAR |
| | | | RGTGGWYFDVWGQG |
| | | | TTVTVSS |
| SEQ ID | VH | E-H.11 | QVQLVQSGAEVKKP |
| NO: 3143 | | | GASVKVSCKASGYA |
| | | | FSSSWMNWVRQAPG |
| | | | QGLEWIGRIYPGDG |
| | | | DTKYNGKFKGRATL |
| | | | TADKSISTAYMELS |
| | | | RLRSDDTAVYYCAR |
| | | | RGTGGWYFDVWGQG |
| | | | TTVTVSS |
| SEQ ID | VH | E-H.12 | QVQLVQSGAEVKKP |
| NO: 3144 | | | GASVKVSCKASGYA |
| | | | FSSSWMNWVRQAPG |
| | | | QGLEWIGRIYPGDG |
| | | | DTKYNGKFKGRATL |
| | | | TADKSISTAYMELS |
| | | | RLRSDDTVVYYCAR |
| | | | RGTGGWYFDVWGQG |
| | | | TTVTVSS |
| SEQ ID | VH | E-H.13 | QVQLVQSGAEVKKP |
| NO: 3145 | | | GASVKVSCKASGYA |
| | | | FSSSWMNWVRQAPG |
| | | | QGLEWIGRIYPGDG |
| | | | DTKYNGKFKGWATL |
| | | | TADKSISTAYMELS |
| | | | RLRSDDTAVYYCAR |
| | | | RGTGGWYFDVWGQG |
| | | | TTVTVSS |
| SEQ ID | VH | E-H.14 | QVQLVQSGAEVKKP |
| NO: 3146 | | | GASVKVSCKASGYA |
| | | | FSSSWMNWVRQATG |
| | | | QGLEWIGRIYPGDG |
| | | | DTKYNGKFKGRATL |
| | | | TANKSISTAYMELS |
| | | | SLRSEDTAVYYCAR |
| | | | RGTGGWYFDVWGQG |
| | | | TTVTVSS |
| SEQ ID | VH | E-H.15 | QVQLVQSGSELKKP |
| NO: 3147 | | | GASVKVSCKASGYA |
| | | | FSSSWMNWVRQAPG |
| | | | QGLEWIGRIYPGDG |
| | | | DTKYNGKFKGRAVL |
| | | | SADKSVSTAYLQIS |
| | | | SLKAEDTAVYYCAR |
| | | | RGTGGWYFDVWGQG |
| | | | TTVTVSS |
| SEQ ID | VH | E-H.16 | QVQLVQSGPEVKKP |
| NO: 3148 | | | GTSVKVSCKASGYA |
| | | | FSSSWMNWVRQARG |
| | | | QRLEWIGRIYPGDG |
| | | | DTKYNGKFKGRATL |
| | | | TADKSTSTAYMELS |
| | | | SLRSEDTAVYYCAR |
| | | | RGTGGWYFDVWGQG |
| | | | TTVTVSS |
| SEQ ID | VH | E-H.17 | EVQLVQSGAEVKKP |
| NO: 3149 | | | GESLKISCKASGYA |
| | | | FSSSWMNWVRQMPG |
| | | | KGLEWIGRIYPGDG |
| | | | DTKYNGKFKGQATL |
| | | | SADKSISTAYLQWS |
| | | | SLKASDTAMYYCAR |
| | | | RGTGGWYFDVWGQG |
| | | | TTVTVSS |
| SEQ ID | VH | E-H.18 | QVQLVQSGSELKKP |
| NO: 3150 | | | GASVKVSCKASGYA |
| | | | FSSSWMNWVRQAPG |
| | | | QGLEWIGRIYPGDG |
| | | | DTKYNGKFKGRAVL |
| | | | SADKSVSMAYLQIS |
| | | | SLKAEDTAVYYCAR |
| | | | RGTGGWYFDVWGQG |
| | | | TTVTVSS |
| SEQ ID | VH | E-H.19 | QVQLVQSGHEVKQP |
| NO: 3151 | | | GASVKVSCKASGYA |
| | | | FSSSWMNWVPQAPG |
| | | | QGLEWIGRIYPGDG |
| | | | DTKYNGKFKGRAVL |
| | | | SADKSASTAYLQIS |
| | | | SLKAEDMAMYYCAR |
| | | | RGTGGWYFDVWGQG |
| | | | TTVTVSS |
| SEQ ID | VH | E-H.20 | EVQLVQSGAEVKKP |
| NO: 3152 | | | GESLKISCKASGYA |
| | | | FSSSWMNWVRQMPG |
| | | | KGLEWIGRIYPGDG |
| | | | DTKYNGKFKGQATL |
| | | | SADKPISTAYLQWS |
| | | | SLKASDTAMYYCAR |
| | | | RGTGGWYFDVWGQG |
| | | | TTVTVSS |
| SEQ ID | VH | E-H.21 | EVQLVQSGAEVKKP |
| NO: 3153 | | | GESLRISCKASGYA |
| | | | FSSSWMNWVRQMPG |
| | | | KGLEWIGRIYPGDG |
| | | | DTKYNGKFKGQATL |
| | | | SADKSISTAYLQWS |
| | | | SLKASDTAMYYCAR |
| | | | RGTGGWYFDVWGQG |
| | | | TTVTVSS |
| SEQ ID | VH | E-H.22 | EVQLVQSGAEVKKP |
| NO: 3154 | | | GESLRISCKASGYA |
| | | | FSSSWMNWVRQMPG |
| | | | KGLEWIGRIYPGDG |
| | | | DTKYNGKFKGHATL |
| | | | SADKSISTAYLQWS |
| | | | SLKASDTAMYYCAR |
| | | | RGTGGWYFDVWGQG |
| | | | TTVTVSS |
| SEQ ID | VH | E-H.23 | QVQLVQSGAEVKKT |
| NO: 3155 | | | GSSVKVSCKASGYA |
| | | | FSSSWMNWVRQAPR |
| | | | QALEWIGRIYPGDG |
| | | | DTKYNGKFKGRATL |
| | | | TADKSMSTAYMELS |
| | | | SLRSEDTAMYYCAR |
| | | | RGTGGWYFDVWGQG |
| | | | TTVTVSS |
| SEQ ID | VH | E-H.24 | EVQLVESGGGLVQP |
| NO: 3156 | | | GRSLRLSCTASGYA |
| | | | FSSSWMNWVRQAPG |
| | | | KGLEWIGRIYPGDG |
| | | | DTKYNGKFKGRATL |
| | | | SADKSKSIAYLQMN |
| | | | SLKTEDTAVYYCAR |
| | | | RGTGGWYFDVWGQG |
| | | | TTVTVSS |
| SEQ ID | VH | E-H.25 | EVQLVESGGGLVQP |
| NO: 3157 | | | GPSLRLSCTASGYA |
| | | | FSSSWMNWVRQAPG |
| | | | KGLEWIGRIYPGDG |
| | | | DTKYNGKFK |
| | | | GRATLSADKSKSIA |
| | | | YLQMNSLKTEDTAV |
| | | | YYCARRGTGGWYFD |
| | | | VWGQGTTVTVSS |
| SEQ ID | VH | E-H.26 | QVQLQESGPGLVKP |
| NO: 3158 | | | SQTLSLTCTASGYA |
| | | | FSSSWMNWVRQPPG |
| | | | KGLEWIGRIYPGDG |
| | | | DTKYNGKFKGRATL |
| | | | SADKSKSQASLKLS |
| | | | SVTAADTAVYYCAR |
| | | | RGTGGWYFDVWGQG |
| | | | TTVTVSS |
| SEQ ID | VH | E-H.27 | QVQLQESGPGLVKP |
| NO: 3159 | | | SGTLSLTCAASGYA |
| | | | FSSSWMNWVRQPPG |
| | | | KGLEWIGRIYPGDG |
| | | | DTKYNGKFKGRATL |
| | | | SADKSKSQASLKLS |
| | | | SVTAADTAVYYCAR |
| | | | RGTGGWYFDVWGQG |
| | | | TTVTVSS |
| SEQ ID | VH | E-H.28 | EVQLVESGGGLVKP |
| NO: 3160 | | | GRSLRLSCTASGYA |
| | | | FSSSWMNWVRQAPG |
| | | | KGLEWIGRIYPGDG |
| | | | DTKYNGKFKGRATL |
| | | | SADKSKSIAYLQMN |
| | | | SLKTEDTAVYYCAR |
| | | | RGTGGWYFDVWGQG |
| | | | TTVTVSS |
| SEQ ID | VH | E-H.29 | EVQLVESGGGLVQP |
| NO: 3161 | | | GGSLKLSCAASGYA |
| | | | FSSSWMNWVRQASG |
| | | | KGLEWIGRIYPGDG |
| | | | DTKYNGKFKGRATL |
| | | | SADKSKSTAYLQMN |
| | | | SLKTEDTAVYYCAR |
| | | | RGTGGWYFDVWGQG |
| | | | TTVTVSS |
| SEQ ID | VH | E-H.30 | QVQLQESGPGLVKP |
| NO: 3162 | | | SQTLSLTCAASGYA |
| | | | FSSSWMNWVRQPPG |
| | | | KGLEWIGRIYPGDG |
| | | | DTKYNGKFKGRATL |
| | | | SADKSKSQASLKLS |
| | | | SVTAADTAVYYCAR |
| | | | RGTGGWYFDVWGQG |
| | | | TTVTVSS |
| SEQ ID | VH | E-H.31 | EVQLVESGGGLVKP |
| NO: 3163 | | | GGSLRLSCAASGYA |
| | | | FSSSWMNWVRQAPG |
| | | | KGLEWIGRIYPGDG |
| | | | DTKYNGKFKGRATL |
| | | | SADKSKSTAYLQMN |
| | | | SLKTEDTAVYYCAR |
| | | | RGTGGWYFDVWGQG |
| | | | TTVTVSS |
| SEQ ID | VH | E-H.32 | EVQLVESGGALVKP |
| NO: 3164 | | | GGSLRLSCAASGYA |
| | | | FSSSWMNWVRQAPG |
| | | | KGLEWIGRIYPGDG |
| | | | DTKYNGKFKGRATL |
| | | | SADKSKSTAYLQMN |
| | | | SLKTEDTAVYYCAR |
| | | | RGTGGWYFDVWGQG |
| | | | TTVTVSS |
| SEQ ID | VH | E-H.33 | QVQLQESGPGLVKP |
| NO: 3165 | | | SQTLSLTCAAYGYA |
| | | | FSSSWMNWVRQPPG |
| | | | KGLEWIGRIYPGDG |
| | | | DTKYNGKFKGRATL |
| | | | SADKSKSQASLKLS |
| | | | SVTAADTAVYYCAR |
| | | | RGTGGWYFDVWGQG |
| | | | TTVTVSS |
| SEQ ID | VH | E-H.34 | QVQLQESGSGLVKP |
| NO: 3166 | | | SQTLSLTCAASGYA |
| | | | FSSSWMNWVRQPPG |
| | | | KGLEWIGRIYPGDG |
| | | | DTKYNGKFKGRATL |
| | | | SADKSKSQASLKLS |
| | | | SVTAADTAVYYCAR |
| | | | RGTGGWYFDVWGQG |
| | | | TTVTVSS |
| SEQ ID | VH | E-H.35 | EVQLVESGGGLVQPG |
| NO: 3167 | | | GSLRLSCAASGYAFS |
| | | | SSWMNWVRQAPGKGL |
| | | | EWIGRIYPGDGDTKY |
| | | | NGKFKGRATLSADKS |
| | | | KSSAYLQMNSLKTED |
| | | | TAVYYCARRGTGGWY |
| | | | FDVWGQGTTVTVSS |
| SEQ ID | VH | E-H.36 | QVQLQESGPGLVKPS |
| NO: 3168 | | | DTLSLTCTASGYAFS |
| | | | SSWMNWVRQPPGKGL |
| | | | EWIGRIYPGDGDTKY |
| | | | NGKFKGRATLSADK |
| | | | SKSQASLKLSSVTA |
| | | | ADTAVYYCARRGTG |
| | | | GWYFDVWGQGTTVT |
| | | | VSS |
| SEQ ID | VH | E-H.37 | QVQLQESGPGLVKPS |
| NO: 3169 | | | QTLSLTCTASGYAFS |
| | | | SSWMNWVRQHPGKGL |
| | | | EWIGRIYPGDGDTKY |
| | | | NGKFKGRATLSADKS |
| | | | KSQASLKLSSVTAAD |
| | | | TAVYYCARRGTGGWY |
| | | | FDVWGQGTTVTVSS |
| SEQ ID | VH | E-H.38 | QVQLQESGPGLVK |
| NO: 3170 | | | PSQTLSLTCTASG |
| | | | YAFSSSWMNWVRQ |
| | | | HPGKGLEWIGRIY |
| | | | PGDGDTKYNGKFK |
| | | | GLATLSADKSKSQ |
| | | | ASLKLSSVTAADT |
| | | | AVYYCARRGTGGW |
| | | | YFDVWGQGTTVTV |
| | | | SS |
| SEQ ID | VH | E-H.39 | QVQLVESGGGVVQ |
| NO: 3171 | | | PGRSLRLSCAASG |
| | | | YAFSSSWMNWVRQ |
| | | | APGKGLEWIGRIY |
| | | | PGDGDTKYNGKFK |
| | | | GRATLSADKSKST |
| | | | AYLQMSSLRAEDT |
| | | | AVYYCARRGTGGW |
| | | | YFDVWGQGTTVTV |
| | | | SS |
| SEQ ID | VH | E-H.40 | QVQLVESGGGLVK |
| NO: 3172 | | | PGGSLRLSCAASG |
| | | | YAFSSSWMNWVRQ |
| | | | APGKGLEWIGRIY |
| | | | PGDGDTKYNGKFK |
| | | | GRATLSADKAKSS |
| | | | AYLQMNSLRAEDT |
| | | | AVYYCARRGTGGW |
| | | | YFDVWGQGTTVTV |
| | | | SS |
| SEQ ID | VH | E-H.41 | QVQLVESGGGLVQ |
| NO: 3173 | | | PGGSLRLSCSASG |
| | | | YAFSSSWMNWVRQ |
| | | | APGKGLEWIGRIY |
| | | | PGDGDTKYNGKFK |
| | | | GRATLSADKSKST |
| | | | AYLQMNSLRAEDT |
| | | | AVYYCARRGTGGW |
| | | | YFDVWGQGTTVTV |
| | | | SS |
| SEQ ID | VH | E-H.42 | QVQLLESGGGLVK |
| NO: 3174 | | | PGGSLRLSCAASG |
| | | | YAFSSSWMNWVRQ |
| | | | APGKGLEWIGRIY |
| | | | PGDGDTKYNGKFK |
| | | | GRATLSADKAKSS |
| | | | AYLQMNSLRAEDT |
| | | | AVYYCARRGTGGW |
| | | | YFDVWGQGTTVTV |
| | | | SS |
| SEQ ID | VH | E-H.43 | EVQLVESGGGLVQ |
| NO: 3175 | | | PGGSLRLSCSASG |
| | | | YAFSSSWMNWVRQ |
| | | | APGKGLEWIGRIY |
| | | | PGDGDTKYNGKFK |
| | | | GRATLSADKSKST |
| | | | AYLQMSSLRAEDT |
| | | | AVYYCARRGTGGW |
| | | | YFDVWGQGTTVTV |
| | | | SS |
| SEQ ID | VH | E-H.44 | QVQLQESGPGLVK |
| NO: 3176 | | | PSDTLSLTCAASG |
| | | | YAFSSSWMNWVRQ |
| | | | PPGKGLEWIGRIY |
| | | | PGDGDTKYNGKFK |
| | | | GRATLSADKSKSQ |
| | | | ASLKLSSVTAVDT |
| | | | AVYYCARRGTGGW |
| | | | YFDVWGQGTTVTV |
| | | | SS |
| SEQ ID | VH | E-H.45 | QVQLQESGPGLVK |
| NO: 3177 | | | PSQTLSLTCAASG |
| | | | YAFSSSWMNWVRQ |
| | | | PPGKGLEWIGRIY |
| | | | PGDGDTKYNGKFK |
| | | | GRATLSADKSKSQ |
| | | | ASLKLSSVTAVDT |
| | | | AVYYCARRGTGGW |
| | | | YFDVWGQGTTVTV |
| | | | SS |
| SEQ ID | VH | E-H.46 | EVQLVESGGGLVQ |
| NO: 3178 | | | PGGSLRLSCSASG |
| | | | YAFSSSWMNWVRQ |
| | | | APGKGLEWIGRIY |
| | | | PGDGDTKYNGKFK |
| | | | GRATLSADKSKST |
| | | | AYVQMSSLRAEDT |
| | | | AVYYCARRGTGGW |
| | | | YFDVWGQGTTVTV |
| | | | SS |
| SEQ ID | VH | E-H.47 | QVQLVDSGGGVVQ |
| NO: 3179 | | | PGRSLRLSCAASG |
| | | | YAFSSSWMNWVRQ |
| | | | APGKGLEWIGRIY |
| | | | PGDGDTKYNGKFK |
| | | | GRATLSADKSKST |
| | | | AYLQMNSLRAEDT |
| | | | AVYYCARRGTGGW |
| | | | YFDVWGQGTTVTV |
| | | | SS |
| SEQ ID | VH | E-H.48 | QVQLVESGGGVVQ |
| NO: 3180 | | | PGRSLRLSCAASG |
| | | | YAFSSSWMNWVRQ |
| | | | APGKGLEWIGRIY |
| | | | PGDGDTKYNGKFK |
| | | | GRATLSADKSKST |
| | | | AYLQMNSLRAEGT |
| | | | AVYYCARRGTGGW |
| | | | YFDVWGQGTTVTV |
| | | | SS |
| SEQ ID | VH | E-H.49 | QVQLVESGGGVVQ |
| NO: 3181 | | | PGRSLRLSCAASG |
| | | | YAFSSSWMNWVRQ |
| | | | APGKGLEWIGRIY |
| | | | PGDGDTKYNGKFK |
| | | | GRATLSADKSKST |
| | | | AYLQMNSLRAEDT |
| | | | AVYYCARRGTGGW |
| | | | YFDVWGQGTTVTV |
| | | | SS |
| SEQ ID | VH | E-H.50 | EVQLVESGGGLVQ |
| NO: 3182 | | | PGGSLRLSCAASG |
| | | | YAFSSSWMNWVRQ |
| | | | APGKGLEWIGRIY |
| | | | PGDGDTKYNGKFK |
| | | | GRATLSADKSKST |
| | | | AYLQMNSLRAEDT |
| | | | AVYYCARRGTGGW |
| | | | YFDVWGQGTTVTV |
| | | | SS |

[0858] In some embodiments, the anti-TCRβV5 antibody molecule comprises a VH and/or a VL of an antibody described in Table 6, or a sequence with at least 80%, 85%, 90%, 95%, 96%, 97%, 98%, 99% or more identity thereto.

[0859] In some embodiments, the anti-TCRβV5 antibody molecule comprises a VH and a VL of an antibody described in Table 6, or a sequence with at least 80%, 85%, 90%, 95%, 96%, 97%, 98%, 99% or more identity thereto.

[0860] In some embodiments, the anti-TCRβV5 antibody molecule comprises a VH and/or a VL of an antibody described in Table 7, or a sequence with at least 80%, 85%, 90%, 95%, 96%, 97%, 98%, 99% or more identity thereto.

[0861] In some embodiments, the anti-TCRβV5 antibody molecule comprises a VH and a VL of an antibody described in Table 7, or a sequence with at least 80%, 85%, 90%, 95%, 96%, 97%, 98%, 99% or more identity thereto.

### Anti-TCRβV10 Antibodies

[0862] Accordingly, in one aspect, the disclosure provides an anti-TCRβV antibody molecule that binds to a human TCRβ V10 subfamily member. In some embodiments, TCRβ V10 subfamily is also known as TCRβ V12. In some embodiments, the TCRβ V10 subfamily comprises: TCRβ V10-1*01, TCRβ V10-1*02, TCRβ V10-3*01 or TCRβ V10-2*01, or a variant thereof.

[0863] Exemplary anti-TCRβV10 antibodies of the disclosure are provided in Table 8. In some embodiments, the anti-TCRβV10 is antibody D, e.g., humanized antibody D (antibody D-H), as provided in Table 8. In some embodiments, antibody D comprises one or more (e.g., three) light chain CDRs and/or one or more (e.g., three) heavy chain CDRs provided in Table 8, or a sequence with at least 95% identity thereto. In some embodiments, antibody D comprises a variable heavy chain (VH) and/or a variable light chain (VL) provided in Table 8, or a sequence with at least 95% identity thereto.

TABLE 8
Amino acid sequences for anti
TCRβ V10 antibodies
Amino acid and nucleotide sequences
for murine and humanized antibody
molecules which bindto TCRBV 10
(e.g., TCRBV 10-1,TCRBV 10-2
Or TCRBV 10-3). The amino acid
the heavy and light chain CDRs,
and the amino acid and nucleotide
sequences of the heavy and light
chain variable regions, and the
heavy and light chains are shown.
Murine antibody D

| | | |
|---|---|---|
| SEQ ID NO: 1288 | HC CDR1 | SYGMS |
| | (Rabat) | |
| SEQ ID NO: 1289 | HC CDR2 | LISSGGSYTYYTDSVRG |
| | (Rabat) | |
| SEQ ID NO: 1290 | HC CDR3 | HGGNFFDY |
| | (Rabat) | |
| SEQ ID NO: 1291 | HC CDR1 | GFTFRSY |
| | (Chothia) | |
| SEQ ID NO: 1292 | HC CDR2 | SSGGSY |
| | (Chothia) | |
| SEQ ID NO: 1290 | HC CDR3 | HGGNFFDY |
| | (Chothia) | |
| SEQ ID NO: 1293 | HC CDR1 | GFTFRSYGMS |
| | (Combined) | |
| SEQ ID NO: 1289 | HC CDR2 | LISSGGSYTYYTDSVRG |
| | (Combined) | |
| SEQ ID NO: 1290 | HC CDR3 | HGGNFFDY |
| | (Combined) | |
| SEQ ID NO: 1294 | LC CDR1 | SVSSSVSYMH |
| | (Rabat) | |
| SEQ ID NO: 1295 | LC CDR2 | DTSRLAS |
| | (Rabat) | |
| SEQ ID NO: 1296 | LC CDR3 | QQWSSNPQYT |
| | (Rabat) | |
| SEQ ID NO: 1297 | LC CDR1 | SSSVSY |
| | (Chothia) | |
| SEQ ID NO: 1295 | LC CDR2 | DTSRLAS |
| | (Chothia) | |
| SEQ ID NO: 1296 | LC CDR3 | QQWSSNPQYT |
| | (Chothia) | |
| SEQ ID NO: 1294 | LC CDR1 | SVSSSVSYMH |
| | (Combined) | |
| SEQ ID NO: 1295 | LC CDR2 | DTSRLAS |
| | (Combined) | |
| SEQ ID NO: 1296 | LC CDR3 | QQWSSNPQYT |
| | (Combined) | |
| SEQ ID NO: 3183 | VH | EVQLVESGGDLVKPGGSLKLSCAVSGFTFRSYG |
| | | MSWVRQTPDKRLEWVALISSGGSYTYYTDSVKG |
| | | RFTISRDNAKNTLYLQMSSLKSEDTAIYYCSRHG |
| | | GNFFDYWGQGTTLTVSS |
| SEQ ID NO: 3184 | VL | QIVLTQSPSIMSASPGEKVTMTCSVSSSVSYMHW |
| | | YQQKSGTSPKRWIYDTSKLASGVPARFSGSGSGT |
| | | SYSLTISSMEAEDAATYYCQQWSSNPQYTFGGG |
| | | TKLEIK |

Humanized antibody D (D-H antibody)
Variable light chain (VL)

| | | | |
|---|---|---|---|
| SEQ ID NO: 3185 | VL | D-VL-H.1 | DIVLTQSPAFLSVTPGEKVTITCSVSSSVSYMHW |
| | | | YQQKPDQAPKLLIYDTSKLASGVPSRFSGSGSGT |
| | | | DYTFTISSLEAEDAATYYCQQWSSNPQYTFGQGT |
| | | | KLEIK |
| SEQ ID NO: 3186 | VL | D-VL-H.2 | AIQLTQSPSSLSASVGDRVTITCSVSSSVSYMHW |
| | | | YQQKPGKAPKLLIYDTSKLASGVPSRFSGSGSGT |
| | | | DYTLTISSLQPEDFATYYCQQWSSNPQYTFGQGT |
| | | | KLEIK |
| SEQ ID NO: 3187 | VL | D-VL-H.3 | DIQLTQSPSFLSASVGDRVTITCSVSSSVSYMHW |
| | | | YQQKPGKAPKLLIYDTSKLASGVPSRFSGSGSGT |
| | | | EYTLTISSLQPEDFATYYCQQWSSNPQYTFGQGT |
| | | | KLEIK |
| SEQ ID NO: 3188 | VL | D-VL-H.4 | DIQLTQSPSSLSASVGDRVTITCSVSSSVSYMHW |
| | | | YQQKPGKAPKLLIYDTSKLASGVPSRFSGSGSGT |
| | | | DYTLTISSLQPEDFATYYCQQWSSNPQYTFGQGT |
| | | | KLEIK |
| SEQ ID NO: 3189 | VL | D-VL-H.5 | DIQLTQSPSSVSASVGDRVTITCSVSSSVSYMHW |
| | | | YQQKPGKAPKLLIYDTSKLASGVPSRFSGSGSGT |
| | | | DYTLTISSLQPEDFATYYCQQWSSNPQYTFGQGT |
| | | | KLEIK |
| SEQ ID NO: 3190 | VL | D-VL-H.6 | DIQLTQSPSSLSASVGDRVTITCSVSSSVSYMHW |
| | | | YQQKPGKVPKLLIYDTSKLASGVPSRFSGSGSGT |
| | | | DYTLTISSLQPEDVATYYCQQWSSNPQYTFGQGT |
| | | | KLEIK |
| SEQ ID NO: 3191 | VL | D-VL-H.7 | DIQLTQSPSSLSASVGDRVTITCSVSSSVSYMHW |
| | | | YQQKPGQAPKLLIYDTSKLASGVPSRFSGSGSGT |
| | | | DYTLTISSLQPEDVATYYCQQWSSNPQYTFGQGT |
| | | | KLEIK |
| SEQ ID NO: 3192 | VL | D-VL-H.8 | EIVLTQSPDFQSVTPKEKVTITCSVSSSVSYMHW |
| | | | YQQKPDQSPKLLIYDTSKLASGVPSRFSGSGSGT |
| | | | DYTLTINSLEAEDAATYYCQQWSSNPQYTFGQG |
| | | | TKLEIK |
| SEQ ID NO: 3193 | VL | D-VL-H.9 | AIRLTQSPFSLSASVGDRVTITCSVSSSVSYMHW |
| | | | YQQKPAKAPKLFIYDTSKLASGVPSRFSGSGSGT |
| | | | DYTLTISSLQPEDFATYYCQQWSSNPQYTFGQGT |
| | | | KLEIK |
| SEQ ID NO: 3194 | VL | D-VL-H.10 | DIQLTQSPSSLSASVGDRVTITCSVSSSVSYMHW |
| | | | YQQKPGKAPKLLIYDTSKLASGVPSRFSGSGSGT |
| | | | DYTFTISSLQPEDIATYYCQQWSSNPQYTFGQGT |
| | | | KLEIK |
| SEQ ID NO: 3195 | VL | D-VL-H.11 | EIVLTQSPATLSLSPGERATLSCSVSSSVSYMHW |
| | | | YQQKPGQAPKLLIYDTSKLASGIPARFSGSGSGT |
| | | | DYTLTISSLEPEDFAVYYCQQWSSNPQYTFGQGT |
| | | | KLEIK |
| SEQ ID NO: 3196 | VL | D-VL-H.12 | DIQLTQSPSTLSASVGDRVTITCSVSSSVSYMHW |
| | | | YQQKPGKAPKLLIYDTSKLASGVPSRFSGSGSGT |
| | | | EYTLTISSLQPDDFATYYCQQWSSNPQYTFGQGT |
| | | | KLEIK |
| SEQ ID NO: 3197 | VL | D-VL-H.13 | DIQLTQSPSSLSASVGDRVTITCSVSSSVSYMHW |
| | | | YQQKPGKTPKLLIYDTSKLASGIPSRFSGSGSGTD |
| | | | YTLTIRSLQPEDFATYYCQQWSSNPQYTFGQGTK |
| | | | LEIK |
| SEQ ID NO: 3198 | VL | D-VL-H.14 | EIVLTQSPPTLSLSPGERVTLSCSVSSSVSYMHWY |
| | | | QQKPGQAPKLLIYDTSKLASGIPARFSGSGSGTD |
| | | | YTLTISSLQPEDFAVYYCQQWSSNPQYTFGQGTK |
| | | | LEIK |
| SEQ ID NO: 3199 | VL | D-VL-H.15 | DIQLTQSPSSLSASVGDRVTITCSVSSSVSYMHW |
| | | | YQQKPGKAPKRLIYDTSKLASGVPSRFSGSGSGT |
| | | | EYTLTISSLQPEDFATYYCQQWSSNPQYTFGQGT |
| | | | KLEIK |
| SEQ ID NO: 3200 | VL | D-VL-H.16 | EIVLTQSPATLSLSPGERATLSCSVSSSVSYMHW |
| | | | YQQKPGQAPKLLIYDTSKLASGIPARFSGSGPGT |
| | | | DYTLTISSLEPEDFAVYYCQQWSSNPQYTFGQGT |
| | | | KLEIK |
| SEQ ID NO: 3201 | VL | D-VL-H.17 | EIVLTQSPATLSLSPGERATLSCSVSSSVSYMHW |
| | | | YQQKPGQAPKLLIYDTSKLASGIPARFSGSGSGT |
| | | | DYTLTISRLEPEDFAVYYCQQWSSNPQYTFGQGT |
| | | | KLEIK |
| SEQ ID NO: 3202 | VL | D-VL-H.18 | EIVLTQSPATLSLSPGERATLSCSVSSSVSYMHW |
| | | | YQQKPGQAPKLLIYDTSKLASGIPARFSGSGSGT |
| | | | DYTLTISSLQPEDFAVYYCQQWSSNPQYTFGQGT |
| | | | KLEIK |
| SEQ ID NO: 3203 | VL | D-VL-H.19 | EIVLTQSPATLSVSPGERATLSCSVSSSVSYMHW |
| | | | YQQKPGQAPKLLIYDTSKLASGIPARFSGSGSGTE |
| | | | YTLTISSLQSEDFAVYYCQQWSSNPQYTFGQGTK |
| | | | LEIK |
| SEQ ID NO: 3204 | VL | D-VL-H.20 | EIVLTQSPATLSVSPGERATLSCSVSSSVSYMHW |
| | | | YQQKPGQAPKLLIYDTSKLASGIPARFSGSGSGTE |
| | | | YTLTISILQSEDFAVYYCQQWSSNPQYTFGQGTK |
| | | | LEIK |
| SEQ ID NO: 3205 | VL | D-VL-H.21 | EIVLTQSPPTLSLSPGERVTLSCSVSSSVSYMHWY |
| | | | QQKPGQAPKLLIYDTSKLASSIPARFSGSGSGTDY |
| | | | TLTISSLQPEDFAVYYCQQWSSNPQYTFGQGTKL |
| | | | EIK |
| SEQ ID NO: 3206 | VL | D-VL-H.22 | DIQLTQSPSSLSASVGDRVTITCSVSSSVSYMHW |
| | | | YQQKPGKAPKSLIYDTSKLASGVPSRFSGSGSGT |
| | | | DYTLTISSLQPEDFATYYCQQWSSNPQYTFGQGT |
| | | | KLEIK |
| SEQ ID NO: 3207 | VL | D-VL-H.23 | DIQLTQSPSSLSASVGDRVTITCSVSSSVSYMHW |
| | | | YQQKPGKAPKRLIYDTSKLASGVPSRFSGSGSGT |
| | | | EYTLTISNLQPEDFATYYCQQWSSNPQYTFGQGT |
| | | | KLEIK |
| SEQ ID NO: 3208 | VL | D-VL-H.24 | DIQLTQSPSAMSASVGDRVTITCSVSSSVSYMHW |
| | | | YQQKPGKVPKRLIYDTSKLASGVPSRFSGSGSGT |
| | | | EYTLTISSLQPEDFATYYCQQWSSNPQYTFGQGT |
| | | | KLEIK |
| SEQ ID NO: 3209 | VL | D-VL-H.25 | EIVLTQSPATLSLSPGERATLSCSVSSSVSYMHW |
| | | | YQQKPGQAPKLLIYDTSKLASGIPDRFSGSGSGT |
| | | | DYTLTISRLEPEDFAVYYCQQWSSNPQYTFGQGT |
| | | | KLEIK |
| SEQ ID NO: 3210 | VL | D-VL-H.26 | EIVLTQSPATLSLSPGERATLSCSVSSSVSYMHW |
| | | | YQQKPGLAPKLLIYDTSKLASGIPDRFSGSGSGTD |
| | | | YTLTISRLEPEDFAVYYCQQWSSNPQYTFGQGTK |
| | | | LEIK |
| SEQ ID NO: 3211 | VL | D-VL-H.27 | EIVLTQSPGTLSLSPGERATLSCSVSSSVSYMHW |
| | | | YQQKPGQAPKLLIYDTSKLASGIPDRFSGSGSGT |
| | | | DYTLTISRLEPEDFAVYYCQQWSSNPQYTFGQGT |
| | | | KLEIK |
| SEQ ID NO: 3212 | VL | D-VL-H.28 | DIQLTQSPSSLSASVGDRVTITCSVSSSVSYMHW |
| | | | YQQKPGKAPKSLIYDTSKLASGVPSKFSGSGSGT |
| | | | DYTLTISSLQPEDFATYYCQQWSSNPQYTFGQGT |
| | | | KLEIK |
| SEQ ID NO: 3213 | VL | D-VL-H.29 | DIQLTQSPSSLSASVGDRVTITCSVSSSVSYMHW |
| | | | YQQKPEKAPKSLIYDTSKLASGVPSRFSGSGSGT |
| | | | DYTLTISSLQPEDFATYYCQQWSSNPQYTFGQGT |
| | | | KLEIK |
| SEQ ID NO: 3214 | VL | D-VL-H.30 | DIVLTQSPDSLAVSLGERATINCSVSSSVSYMHW |
| | | | YQQKPGQPPKLLIYDTSKLASGVPDRFSGSGSGT |
| | | | DYTLTISSLQAEDVAVYYCQQWSSNPQYTFGQG |
| | | | TKLEIK |
| SEQ ID NO: 3215 | VL | D-VL-H.31 | EIVLTQTPLSLSITPGEQASMSCSVSSSVSYMHWY |
| | | | LQKARPVPKLLIYDTSKLASGVPDRFSGSGSGTD |
| | | | YTLKISRVEAEDFGVYYCQQWSSNPQYTFGQGT |
| | | | KLEIK |
| SEQ ID NO: 3216 | VL | D-VL-H.32 | EIVLTQTPLSLSITPGEQASISCSVSSSVSYMHWY |
| | | | LQKARPVPKLLIYDTSKLASGVPDRFSGSGSGTD |
| | | | YTLKISRVEAEDFGVYYCQQWSSNPQYTFGQGT |
| | | | KLEIK |
| SEQ ID NO: 3217 | VL | D-VL-H.33 | DIVLTQSPLSLPVTPGEPASISCSVSSSVSYMHWY |
| | | | LQKPGQSPKLLIYDTSKLASGVPDRFSGSGSGTD |
| | | | YTLKISRVEAEDVGVYYCQQWSSNPQYTFGQGT |
| | | | KLEIK |
| SEQ ID NO: 3218 | VL | D-VL-H.34 | DIVLTQSPLSLPVTLGQPASISCSVSSSVSYMHWY |
| | | | QQRPGQSPKRLIYDTSKLASGVPDRFSGSGSGTD |
| | | | YTLKISRVEAEDVGVYYCQQWSSNPQYTFGQGT |
| | | | KLEIK |
| SEQ ID NO: 3219 | VL | D-VL-H.35 | DIVLTQTPLSLPVTPGEPASISCSVSSSVSYMHWY |
| | | | LQKPGQSPKLLIYDTSKLASGVPDRFSGSGSGTD |
| | | | YTLKISRVEAEDVGVYYCQQWSSNPQYTFGQGT |
| | | | KLEIK |
| SEQ ID NO: 3220 | VL | D-VL-H.36 | DIVLTQTPLSLSVTPGQPASISCSVSSSVSYMHWY |
| | | | LQKPGQSPKLLIYDTSKLASGVPDRFSGSGSGTD |
| | | | YTLKISRVEAEDVGVYYCQQWSSNPQYTFGQGT |
| | | | KLEIK |
| SEQ ID NO: 3221 | VL | D-VL-H.37 | DIVLTQTPLSLSVTPGQPASISCSVSSSVSYMHWY |
| | | | LQKPGQPPKLLIYDTSKLASGVPDRFSGSGSGTD |
| | | | YTLKISRVEAEDVGVYYCQQWSSNPQYTFGQGT |
| | | | KLEIK |
| SEQ ID NO: 3222 | VL | D-VL-H.38 | DIQLIQSPSFLSASVGDRVSIICSVSSSVSYMHWY |
| | | | LQKPGKSPKLFIYDTSKLASGVSSRFSGRGSGTD |
| | | | YTLTIISLKPEDFAAYYCQQWSSNPQYTFGQGTK |
| | | | LEIK |
| SEQ ID NO: 3223 | VL | D-VL-H.39 | DIVLTQTPLSSPVTLGQPASISCSVSSSVSYMHWY |
| | | | QQRPGQPPKLLIYDTSKLASGVPDRFSGSGAGTD |
| | | | YTLKISRVEAEDVGVYYCQQWSSNPQYTFGQGT |
| | | | KLEIK |
| SEQ ID NO: 3224 | VL | D-VL-H.40 | EITLTQSPAFMSATPGDKVNISCSVSSSVSYMHW |
| | | | YQQKPGEAPKFIIYDTSKLASGIPPRFSGSGYGTD |
| | | | YTLTINNIESEDAAYYYCQQWSSNPQYTFGQGT |
| | | | KLEIK |

Variable HEAVY chain (VH)

| | | | |
|---|---|---|---|
| SEQ ID NO: 3225 | VH | D-VH-H.1 | EVQLVESGGGLVKPGGSLRLSCAVSGFTFRSYG |
| | | | MSWVRQAPGKGLEWVALISSGGSYTYYTDSVK |
| | | | GRFTISRDNSKNTLYLQMNSLKTEDTAVYYCSR |
| | | | HGGNFFDYWGQGTTVTVSS |
| SEQ ID NO: 3226 | VH | D-VH-H.2 | EVQLVESGGALVKPGGSLRLSCAVSGFTFRSYG |
| | | | MSWVRQAPGKGLEWVALISSGGSYTYYTDSVK |
| | | | GRFTISRDNSKNTLYLQMNSLKTEDTAVYYCSR |
| | | | HGGNFFDYWGQGTTVTVSS |
| SEQ ID NO: 3227 | VH | D-VH-H.3 | EVQLVESGGGLVQPGGSLRLSCAVSGFTFRSYG |
| | | | MSWVRQAPGKGLEWVALISSGGSYTYYTDSVK |
| | | | GRFTISRDNAKNTLYLQMNSLRAEDTAVYYCSR |
| | | | HGGNFFDYWGQGTTVTVSS |
| SEQ ID NO: 3228 | VH | D-VH-H.4 | EVQLVESGGGLVQPGGSLRLSCAVSGFTFRSYG |
| | | | MSWVRQAPGKGLEWVALISSGGSYTYYTDSVK |
| | | | GRFTISRDNAKNSLYLQMNSLRAEDTAVYYCSR |
| | | | HGGNFFDYWGQGTTVTVSS |
| SEQ ID NO: 3229 | VH | D-VH-H.5 | EVQLVESGGGLVQPGGSLRLSCAVSGFTFRSYG |
| | | | MSWVRQAPGKGLEWVALISSGGSYTYYTDSVK |
| | | | GRFTISRDNSKNSLYLQMNSLKTEDTAVYYCSR |
| | | | HGGNFFDYWGQGTTVTVSS |
| SEQ ID NO: 3230 | VH | D-VH-H.6 | EVQLVESGGGLVQPGGSLRLSCAVSGFTFRSYG |
| | | | MSWVRQAPGKGLEWVALISSGGSYTYYTDSVK |
| | | | GRFTISRDNAKNSLYLQMNSLRAEDMAVYYCSR |
| | | | HGGNFFDYWGQGTTVTVSS |
| SEQ ID NO: 3231 | VH | D-VH-H.7 | EVQLVESGGGLVQPGGSLRLSCAVSGFTFRSYG |
| | | | MSWVRQAPGKGLEWVALISSGGSYTYYTDSVK |
| | | | GQFTISRDNAKNTLYLQMNSLRAEDMAVYYCSR |
| | | | HGGNFFDYWGQGTTVTVSS |
| SEQ ID NO: 3232 | VH | D-VH-H.8 | EVQLVESGGGLVKPGRSLRLSCTVSGFTFRSYGM |
| | | | SWVRQAPGKGLEWVALISSGGSYTYYTDSVKGR |
| | | | FTISRDNSKNILYLQMNSLKTEDTAVYYCSRHGG |
| | | | NFFDYWGQGTTVTVSS |
| SEQ ID NO: 3233 | VH | D-VH-H.9 | EVQLVESGGGLVKPGGSLRLSCAVSGFTFRSYG |
| | | | MSWVRQAPGKGLEWVALISSGGSYTYYTDSVK |
| | | | GRFTISRDNAKNSLYLQiVlNSLRAEDTAVYYCSR |
| | | | HGGNFFDYWGQGTTVTVSS |
| SEQ ID NO: 3234 | VH | D-VH-H.10 | EVQLVESGGGLVQPGGSLKLSCAVSGFTFRSYG |
| | | | MSWVRQASGKGLEWVALISSGGSYTYYTDSVK |
| | | | GRFTISRDNSKNTLYLQMNSLKTEDTAVYYCSR |
| | | | HGGNFFDYWGQGTTVTVSS |
| SEQ ID NO: 3235 | VH | D-VH-H.11 | QVQLVESGGGVVQPGGSLRLSCAVSGFTFRSYG |
| | | | MSWVRQAPGKGLEWVALISSGGSYTYYTDSVK |
| | | | GRFTISRDNSKNTLYLQMNSLRAEDTAVYYCSR |
| | | | HGGNFFDYWGQGTTVTVSS |
| SEQ ID NO: 3236 | VH | D-VH-H.12 | QVQLVESGGGVVQPGRSLRLSCAVSGFTFRSYG |
| | | | MSWVRQAPGKGLEWVALISSGGSYTYYTDSVK |
| | | | GRFTISRDNSKNTLYLQMSSLRAEDTAVYYCSRH |
| | | | GGNFFDYWGQGTTVTVSS |
| SEQ ID NO: 3237 | VH | D-VH-H.13 | EVQLVESGGGLVQPGGSLRLSCPVSGFTFRSYGM |
| | | | SWVRQAPGKGLEWVALISSGGSYTYYTDSVKGR |
| | | | FTISRDNANNSLYLQMNSLRAEDTAVYYCSRHG |
| | | | GNFFDYWGQGTTVTVSS |
| SEQ ID NO: 3238 | VH | D-VH-H.14 | EVQLVESGGGLVQPGRSLRLSCTVSGFTFRSYGM |
| | | | SWVRQAPGKGLEWVALISSGGSYTYYTDSVKGR |
| | | | FTISRDNSKNILYLQMNSLKTEDTAVYYCSRHGG |
| | | | NFFDYWGQGTTVTVSS |
| SEQ ID NO: 3239 | VH | D-VH-H.15 | EVQLVESGGGLVQPGPSLRLSCTVSGFTFRSYGM |
| | | | SWVRQAPGKGLEWVALISSGGSYTYYTDSVKGR |
| | | | FTISRDNSKNILYLQMNSLKTEDTAVYYCSRHGG |
| | | | NFFDYWGQGTTVTVSS |
| SEQ ID NO: 3240 | VH | D-VH-H.16 | EVQLVESGGGLVQPGGSLRLSCAVSGFTFRSYG |
| | | | MSWVRQAPGKGLEWVALISSGGSYTYYTDSVK |
| | | | GRFTISRDNSKNTLYLQMNSLRAEDTAVYYCSR |
| | | | HGGNFFDYWGQGTTVTVSS |
| SEQ ID NO: 3241 | VH | D-VH-H.17 | EVQLVESGGGLVQPGGSLRLSCAVSGFTFRSYG |
| | | | MSWVRQAPGKGLEWVALISSGGSYTYYTDSVK |
| | | | GRFTISRDNAKNSLYLQMNSLRDEDTAVYYCSR |
| | | | HGGNFFDYWGQGTTVTVSS |
| SEQ ID NO: 3242 | VH | D-VH-H.18 | QVQLVESGGGLVKPGGSLRLSCAVSGFTFRSYG |
| | | | MSWVRQAPGKGLEWVALISSGGSYTYYTDSVK |
| | | | GRFTISRDNAKNSLYLQMNSLRAEDTAVYYCSR |
| | | | HGGNFFDYWGQGTTVTVSS |
| SEQ ID NO: 3243 | VH | D-VH-H.19 | QVQLVESGGGVVQPGRSLRLSCAVSGFTFRSYG |
| | | | MSWVRQAPGKGLEWVALISSGGSYTYYTDSVK |
| | | | GRFTISRDNSKNTLYLQMNSLRAEDTAVYYCSR |
| | | | HGGNFFDYWGQGTTVTVSS |
| SEQ ID NO: 3244 | VH | D-VH-H.20 | EVQLLESGGGLVQPGGSLRLSCAVSGFTFRSYG |
| | | | MSWVRQAPGKGLEWVALISSGGSYTYYTDSVK |
| | | | GRFTISRDNSKNTLYLQMNSLRAEDTAVYYCSR |
| | | | HGGNFFDYWGQGTTVTVSS |
| SEQ ID NO: 3245 | VH | D-VH-H.21 | EVQLVESGGGLVQPGGSLRLSCAVSGFTFRSYG |
| | | | MSWVRQAPGKGLEWVALISSGGSYTYYTDSVK |
| | | | GRFTISRHNSKNTLYLQMNSLRAEDTAVYYCSR |
| | | | HGGNFFDYWGQGTTVTVSS |
| SEQ ID NO: 3246 | VH | D-VH-H.22 | EVQLVESGGGLIQPGGSLRLSCAVSGFTFRSYGM |
| | | | SWVRQPPGKGLEWVALISSGGSYTYYTDSVKGR |
| | | | FTISRDNSKNTLYLQMNSLRAEDTAVYYCSRHG |
| | | | GNFFDYWGQGTTVTVSS |
| SEQ ID NO: 3247 | VH | D-VH-H.23 | EVQLVESGGGLIQPGGSLRLSCAVSGFTFRSYGM |
| | | | SWVRQAPGKGLEWVALISSGGSYTYYTDSVKGR |
| | | | FTISRDNSKNTLYLQMNSLRAEDTAVYYCSRHG |
| | | | GNFFDYWGQGTTVTVSS |
| SEQ ID NO: 3248 | VH | D-VH-H.24 | EVQLVESGGGLVQPGRSLRLSCAVSGFTFRSYG |
| | | | MSWVRQAPGKGLEWVALISSGGSYTYYTDSVK |
| | | | GRFTISRDNAKNSLYLQMNSLRAEDTALYYCSR |
| | | | HGGNFFDYWGQGTTVTVSS |
| SEQ ID NO: 3249 | VH | D-VH-H.25 | QVQLVESGGGVVQPGRSLRLSCAVSGFTFRSYG |
| | | | MSWVRQAPGKGLEWVALISSGGSYTYYTDSVK |
| | | | GRFTISRDNSKNRLYLQMNSLRAEDTAVYYCSR |
| | | | HGGNFFDYWGQGTTVTVSS |
| SEQ ID NO: 3250 | VH | D-VH-H.26 | QVQLVESGGGVVQPGRSLRLSCAVSGFTFRSYG |
| | | | MSWVRQAPGKGLEWVALISSGGSYTYYTDSVK |
| | | | GRFTISRDNSKNTLYLQMNSLRAEGTAVYYCSR |
| | | | HGGNFFDYWGQGTTVTVSS |
| SEQ ID NO: 3251 | VH | D-VH-H.27 | QVQLVESGGGVVQPGRSLRLSCAVSGFTFRSYG |
| | | | MSWVRQAPGKGLEWVALISSGGSYTYYTDSVK |
| | | | GRFAISRDNSKNTLYLQMNSLRAEDTAVYYCSR |
| | | | HGGNFFDYWGQGTTVTVSS |
| SEQ ID NO: 3252 | VH | D-VH-H.28 | QVQLVDSGGGVVQPGRSLRLSCAVSGFTFRSYG |
| | | | MSWVRQAPGKGLEWVALISSGGSYTYYTDSVK |
| | | | GRFTISRDNSKNTLYLQMNSLRAEDTAVYYCSR |
| | | | HGGNFFDYWGQGTTVTVSS |
| SEQ ID NO: 3253 | VH | D-VH-H.29 | EVQLVESGGGVVRPGGSLRLSCAVSGFTFRSYG |
| | | | MSWVRQAPGKGLEWVALISSGGSYTYYTDSVK |
| | | | GRFTISRDNAKNSLYLQMNSLRAEDTALYHCSR |
| | | | HGGNFFDYWGQGTTVTVSS |
| SEQ ID NO: 3254 | VH | D-VH-H.30 | EVQLVESGGVVVQPGGSLRLSCAVSGFTFRSYG |
| | | | MSWVRQAPGKGLEWVALISSGGSYTYYTDSVK |
| | | | GRFTISRDNSKNSLYLQMNSLRAEDTALYYCSRH |
| | | | GGNFFDYWGQGTTVTVSS |
| SEQ ID NO: 3255 | VH | D-VH-H.31 | EVQLVESGGGVVQPGGSLRLSCAVSGFTFRSYG |
| | | | MSWVRQAPGKGLEWVALISSGGSYTYYTDSVK |
| | | | GRFTISRDNSKNSLYLQMNSLRTEDTALYYCSRH |
| | | | GGNFFDYWGQGTTVTVSS |
| SEQ ID NO: 3256 | VH | D-VH-H.32 | EVQLVESGGVVVQPGGSLRLSCAVSGFTFRSYG |
| | | | MSWVRQAPGKGLEWVALISSGGSYTYYTDSVK |
| | | | GRFTISRDNSKNSLYLQMNSLRTEDTALYYCSRH |
| | | | GGNFFDYWGQGTTVTVSS |
| SEQ ID NO: 3257 | VH | D-VH-H.33 | EVQLVETGGGLIQPGGSLRLSCAVSGFTFRSYGM |
| | | | SWVRQAPGKGLEWVALISSGGSYTYYTDSVKGR |
| | | | FTISRDNSKNTLYLQMNSLRAEDTAVYYCSRHG |
| | | | GNFFDYWGQGTTVTVSS |
| SEQ ID NO: 3258 | VH | D-VH-H.34 | EVQLVESGGGLVQPGGSLRLSCAVSGFTFRSYG |
| | | | MSWVRQATGKGLEWVALISSGGSYTYYTDSVK |
| | | | GRFTISRENAKNSLYLQMNSLRAGDTAVYYCSR |
| | | | GGNFFDYWGQGTTVTVSS |
| SEQ ID NO: 3259 | VH | D-VH-H.35 | EVQLVESRGVLVQPGGSLRLSCAVSGFTFRSYG |
| | | | MSWVRQAPGKGLEWVALISSGGSYTYYTDSVK |
| | | | GRFTISRDNSKNTLHLQMNSLRAEDTAVYYCSR |
| | | | HGGNFFDYWGQGTTVTVSS |
| SEQ ID NO: 3260 | VH | D-VH-H.36 | EVQLVESGGGLVQPGRSLRLSCAVSGFTFRSYG |
| | | | MSWVRQAPGKGLEWVALISSGGSYTYYTDSVK |
| | | | GRFTISRDNAKNSLYLQMNSLRAEDMALYYCSR |
| | | | HGGNFFDYWGQGTTVTVSS |
| SEQ ID NO: 3261 | VH | D-VH-H.37 | QVQLVESGGGLVQPGGSLRLSCSVSGFTFRSYG |
| | | | MSWVRQAPGKGLEWVALISSGGSYTYYTDSVK |
| | | | GRFTISRDNSKNTLYLQMNSLRAEDTAVYYCSR |
| | | | HGGNFFDYWGQGTTVTVSS |
| SEQ ID NO: 3262 | VH | D-VH-H.38 | EVQLVESGGGLVQPGGSLRLSCSVSGFTFRSYGM |
| | | | SWVRQAPGKGLEWVALISSGGSYTYYTDSVKGR |
| | | | FTISRDNSKNTLYLQMSSLRAEDTAVYYCSRHG |
| | | | GNFFDYWGQGTTVTVSS |
| SEQ ID NO: 3263 | VH | D-VH-H.39 | QVQLVESGGGVVQPGRSLRLSCAVSGFTFRSYG |
| | | | MSWVRQAPGKGLEWVALISSGGSYTYYTDSVK |
| | | | GRFTISRDNSTNTLFLQMNSLRAEDTAVYYCSRH |
| | | | GGNFFDYWGQGTTVTVSS |
| SEQ ID NO: 3264 | VH | D-VH-H.40 | QVQLLESGGGLVKPGGSLRLSCAVSGFTFRSYG |
| | | | MSWVRQAPGKGLEWVALISSGGSYTYYTDSVK |
| | | | GRFTISRDNAKNSLYLQMNSLRAEDTAVYYCSR |
| | | | HGGNFFDYWGQGTTVTVSS |
| SEQ ID NO: 3265 | VH | D-VH-H.41 | EVQLVESGEGLVQPGGSLRLSCAVSGFTFRSYG |
| | | | MSWVRQAPGKGLEWVALISSGGSYTYYTDSVK |
| | | | GRFTISRDNSKNTLYLQMGSLRAEDMAVYYCSR |
| | | | HGGNFFDYWGQGTTVTVSS |
| SEQ ID NO: 3266 | VH | D-VH-H.42 | EVQLVESGGGLVQPGGSLRLSCAVSGFTFRSYG |
| | | | MSWVRQAPGKGLEWVALISSGGSYTYYTDSVK |
| | | | GRFTISRDNSKNTLYLQMGSLRAEDMAVYYCSR |
| | | | HGGNFFDYWGQGTTVTVSS |
| SEQ ID NO: 3267 | VH | D-VH-H.43 | EVQLVESGGGLVQPGGSLRLSCSVSGFTFRSYGM |
| | | | SWVRQAPGKGLEWVALISSGGSYTYYTDSVKGR |
| | | | FTISRDNSKNTLYVQMSSLRAEDTAVYYCSRHG |
| | | | GNFFDYWGQGTTVTVSS |
| SEQ ID NO: 3268 | VH | D-VH-H.44 | EVQLVESGGGLVQPGGSLRLSCAVSGFTFRSYG |
| | | | MSWVRQAPGKGLEWVALISSGGSYTYYTDSVK |
| | | | GRFIISRDNSRNSLYLQKNRRRAEDMAVYYCSR |
| | | | HGGNFFDYWGQGTTVTVSS |
| SEQ ID NO: 3269 | VH | D-VH-H.45 | EVQLVESGGGLVQPGGSLRLSCAVSGFTFRSYG |
| | | | MSWVHQAPGKGLEWVALISSGGSYTYYTDSVK |
| | | | GRFIISRDNSRNTLYLQTNSLRAEDTAVYYCSRH |
| | | | GGNFFDYWGQGTTVTVSS |
| SEQ ID NO: 3270 | VH | D-VH-H.46 | EVHLVESGGGLVQPGGALRLSCAVSGFTFRSYG |
| | | | MSWVRQATGKGLEWVALISSGGSYTYYTDSVK |
| | | | GRFTISRENAKNSLYLQMNSLRAGDTAVYYCSR |
| | | | HGGNFFDYWGQGTTVTVSS |
| SEQ ID NO: 3271 | VH | D-VH-H.47 | EVQLVESGGGLVQPRGSLRLSCAVSGFTFRSYG |
| | | | MSWVRQAPGKGLEWVALISSGGSYTYYTDSVK |
| | | | GRFTISRDNSKNTLYLQMNNLRAEGTAVYYCSR |
| | | | HGGNFFDYWGQGTTVTVSS |
| SEQ ID NO: 3272 | VH | D-VH-H.48 | EVQLVESGGGLVQPRGSLRLSCAVSGFTFRSYG |
| | | | MSWVRQAPGKGLEWVALISSGGSYTYYTDSVK |
| | | | GRFTISRDNSKNTLYLQMNNLRAEGTAAYYCSR |
| | | | HGGNFFDYWGQGTTVTVSS |
| SEQ ID NO: 3273 | VH | D-VH-H.49 | QVQLVQSGAEVKKPGASVKVSCKVSGFTFRSYG |
| | | | MSWVRQAPGKGLEWVALISSGGSYTYYTDSVK |
| | | | GRFTITRDNSTNTLYMELSSLRSEDTAVYYCSRH |
| | | | GGNFFDYWGQGTTVTVSS |
| SEQ ID NO: 3274 | VH | D-VH-H.50 | QVQLVQSGSELKKPGASVKVSCKVSGFTFRSYG |
| | | | MSWVRQAPGQGLEWVALISSGGSYTYYTDSVK |
| | | | GRFVISRDNSVNTLYLQISSLKAEDTAVYYCSRH |
| | | | GGNFFDYWGQGTTVTVSS |

[0864] In some embodiments, the anti-TCRβV10 antibody molecule comprises a VH or a VL of an antibody described in Table 8, or a sequence with at least 80%, 85%, 90%, 95%, 96%, 97%, 98%, 99% or more identity thereto.

[0865] In some embodiments, the anti-TCRβV10 antibody molecule comprises a VH and a VL of an antibody described in Table 8, or a sequence with at least 80%, 85%, 90%, 95%, 96%, 97%, 98%, 99% or more identity thereto.

### Additional Anti-TCRVβ Antibodies

[0866] Additional exemplary anti-TCRβV antibodies of the disclosure are provided in Table 9. In some embodiments, the anti-TCRβV antibody is a humanized antibody, e.g., as provided in Table 9. In some embodiments, the anti-TCRβV antibody comprises one or more (e.g., all three) of a LC CDR1, LC CDR2, and LC CDR3 provided in Table 9; and/or one or more (e.g., all three) of a HC CDR1, HC CDR2, and HC CDR3 provided in Table 9, or a sequence with at least 95% identity thereto. In some embodiments, the anti-TCRβV antibody comprises a variable heavy chain (VH) and/or a variable light chain (VL) provided in Table 9, or a sequence with at least 95% identity thereto.

TABLE 9
Amino acid sequences for additional anti-TCRβ V antibodies
Antibody G (murine) binds to human TCRVβ 20-1

| | | |
|---|---|---|
| SEQ ID NO: 1102 | HC CDR1 (Kabat) | SAYMH |
| SEQ ID NO: 1103 | HC CDR2 (Kabat) | RIDPATGKTKYAPKFQA |
| SEQ ID NO: 1104 | HC CDR3 (Kabat) | SLNWDYGLDY |
| SEQ ID NO: 1105 | HC CDR1 (Chothia) | GFNIKSA |
| SEQ ID NO: 1106 | HC CDR2 (Chothia) | DPATGK |
| SEQ ID NO: 1104 | HC CDR3 (Chothia) | SLNWDYGLDY |
| SEQ ID NO: 3474 | HC CDR1 (Combined) | GFNIKSAYMH |
| SEQ ID NO: 1103 | HC CDR2 (Combined) | RIDPATGKTKYAPKFQA |
| SEQ ID NO: 1104 | HC CDR3 (Combined) | SLNWDYGLDY |
| SEQ ID NO: 1107 | LC CDR1 (Kabat) | RASKSVSILGTHLIH |
| SEQ ID NO: 1108 | LC CDR2 (Kabat) | AASNLES |
| SEQ ID NO: 1109 | LC CDR3 (Kabat) | QQSIEDPWT |
| SEQ ID NO: 1110 | LC CDR1 (Chothia) | SKSVSILGTHL |
| SEQ ID NO: 1108 | LC CDR2 (Chothia) | AASNLES |
| SEQ ID NO: 1109 | LC CDR3 (Chothia) | QQSIEDPWT |
| SEQ ID NO: 1107 | LC CDR1 (Combined) | RASKSVSILGTHLIH |
| SEQ ID NO: 1108 | LC CDR2 (Combined) | AASNLES |
| SEQ ID NO: 1109 | LC CDR3(Combined) | QQSIEDPWT |
| SEQ ID NO: 1111 | VL | DIVLTQSPASLAVSLGQRATISCRASKSVSILGTHL |
| | | IHWYQQKPGQPPKLLIYAASNLESGVPARFSGSGS |
| | | ETVFTLNIHPVEEEDAATYFCQQSIEDPWTFGGGT |
| | | KLGIK |
| SEQ ID NO: 1112 | VH | EVQLQQSVADLVRPGASLKLSCTASGFNIKSAYM |
| | | HWVIQRPDQGPECLGRIDPATGKTKYAPKFQAKA |
| | | TITADTSSNTAYLQLSSLTSEDTAIYYCTRSLNWD |
| | | YGLDYWGQGTSVTVSS |

Antibody G-H (humanized) VHs binds to human TCRVβ 20-1

| | | |
|---|---|---|
| SEQ ID NO: 1113 | VH - 1 | QVQLVQSGAEVKKPGASVKVSCKASGFNIKSAY |
| | | MHWVRQAPGQGLEWMGRIDPATGKTKYAPKFQ |
| | | ARVTMTADTSTNTAYMELSSLRSEDTAVYYCAR |
| | | SLNWDYGLDYWGQGTLVTVSS |
| SEQ ID NO: 1114 | VH - 2 | QVQLVQSGAEVKKPGASVKVSCKASGFNIKSAY |
| | | MHWVRQAPGQEPGCMGRIDPATGKTKYAPKFQA |
| | | RVTMTADTSINTAYTELSSLRSEDTATYYCARSLN |
| | | WDYGLDYWGQGTLVTVSS |
| SEQ ID NO: 1115 | VH - 3 | QVQLVQSGAEVKKPGSSVKVSCKASGFNIKSAY |
| | | MHWVRQAPGQGLEWMGRIDPATGKTKYAPKFQ |
| | | ARVTITADTSTNTAYMELSSLRSEDTAVYYCARS |
| | | LNWDYGLDYWGQGTLVTVSS |
| SEQ ID NO: 1116 | VH - 4 | QVQLVQSGAEVKKPGASVKVSCKASGFNIKSAY |
| | | MHWVRQAPGQRLEWMGRIDPATGKTKYAPKFQ |
| | | ARVTITADTSANTAYMELSSLRSEDTAVYYCARS |
| | | LNWDYGLDYWGQGTLVTVSS |

Antibody G-H (humanized) VLs binds to human TCRVβ 20-1

| | | |
|---|---|---|
| SEQ ID NO: 1117 | VL - 1 | EIVLTQSPATLSLSPGERATLSCRASKSVSILGTHLI |
| | | HWYQQKPGQAPRLLIYAASNLESGIPARFSGSGSE |
| | | TDFTLTISSLEPEDFAVYFCQQSIEDPFGGGTKVEI |
| | | K |
| SEQ ID NO: 1118 | VL - 2 | EIVLTQSPATLSLSPGERATLSCRASKSVSILGTHLI |
| | | HWYQQKPGLAPRLLIYAASNLESGIPDRFSGSGSE |
| | | TDFTLTISRLEPEDFAVYFCQQSIEDPFGGGTKVEI |
| | | K |
| SEQ ID NO: 1119 | VL - 3 | EIVLTQSPGTLSLSPGERATLSCRASKSVSILGTHLI |
| | | HWYQQKPGQAPRLLIYAASNLESGIPDRFSGSGSE |
| | | TDFTLTISRLEPEDFAVYFCQQSIEDPFGGGTKVEI |
| | | K |

Antibody H (murine) binds to human TCRVβ 27

| | | |
|---|---|---|
| SEQ ID NO: 1120 | HC CDR1 (Kabat) | DTYMY |
| SEQ ID NO: 1121 | HC CDR2 (Kabat) | RIDPANGNTKYDPKFQD |
| SEQ ID NO: 1122 | HC CDR3 (Kabat) | GSYYYAMDY |
| SEQ ID NO: 1123 | HC CDR1 (Chothia) | GFKTEDT |
| SEQ ID NO: 1124 | HC CDR2 (Chothia) | DPANGN |
| SEQ ID NO: 1122 | HC CDR3 (Chothia) | GSYYYAMDY |
| SEQ ID NO: 1125 | HC CDR1 (Combined) | GFKTEDTYMY |
| SEQ ID NO: 1121 | HC CDR2 (Combined) | RIDPANGNTKYDPKFQD |
| SEQ ID NO: 1122 | HC CDR3(Combined) | GSYYYAMDY |
| SEQ ID NO: 1126 | LC CDR1 (Kabat) | RA SESVD SYGNSFMH |
| SEQ ID NO: 1127 | LC CDR2 (Kabat) | RASNLES |
| SEQ ID NO: 1128 | LC CDR3 (Kabat) | QQSNEDPYT |
| SEQ ID NO: 3475 | LC CDR1 (Chothia) | SESVDSYGNSF |
| SEQ ID NO: 1127 | LC CDR2 (Chothia) | RASNLES |
| SEQ ID NO: 1128 | LC CDR3 (Chothia) | QQSNEDPYT |
| SEQ ID NO: 1126 | LC CDR1 (Combined) | RASESVDSYGNSFMH |
| SEQ ID NO: 1127 | LC CDR2 (Combined) | RASNLES |
| SEQ ID NO: 1128 | LC CDR3(Combined) | QQSNEDPYT |
| SEQ ID NO: 1129 | VL | DIVLTQSPASLAVSLGQRATISCRASESVDSYGNS |
| | | FMHWYQQKPGQPPKLLIYRASNLESGIPARFSGSG |
| | | SRTDFTLTINPVEADDVATYYCQQSNEDPYTFGG |
| | | GTKLEIK |
| SEQ ID NO: 1130 | VH | EVQLQQSGAELVKPGASVKLSCTASGFKTEDTYM |
| | | YWVKQRPEQGLEWIGRIDPANGNTKYDPKFQDK |
| | | ATITADSSSNTAYLQLSSLPSEDTAVYYCARGSYY |
| | | YAMDYWGQGTSVTVSS |

Antibody H-H (humanized) VHs binds to human TCRVβ 27

| | | |
|---|---|---|
| SEQ ID NO: 1131 | VH - 1 | QVQLVQSGAEVKKPGSSVKVSCKASGFKTEDTY |
| | | MYWVRQAPGQGLEWIGRIDPANGNTKYDPKFQD |
| | | RATITADSSTNTAYMELSSLRSEDTAVYYCARGS |
| | | YYYAMDYWGQGTLVTVSS |
| SEQ ID NO: 1132 | VH - 2 | QVQLVQSGAEVKKPGASVKVSCKASGFKTEDTY |
| | | MYWVRQAPGQRLEWIGRIDPANGNTKYDPKFQD |
| | | RATITADSSANTAYMELSSLRSEDTAVYYCARGS |
| | | YYYAMDYWGQGTLVTVSS |
| SEQ ID NO: 1133 | VH - 3 | EVQLVESGGGLVQPGGSLKLSCAASGFKTEDTYM |
| | | YWVRQASGKGLEWIGRIDPANGNTKYDPKFQDR |
| | | ATISADSSKNTAYLQMNSLKTEDTAVYYCARGSY |
| | | YYAMDYWGQGTLVTVSS |
| SEQ ID NO: 1134 | VH - 4 | EVQLVQSGAEVKKPGESLRISCKASGFKTEDTYM |
| | | YWVRQMPGKGLEWIGRIDPANGNTKYDPKFQDQ |
| | | ATISADSSINTAYLQWSSLKASDTAMYYCARGSY |
| | | YYAMDYWGQGTLVTVSS |
| SEQ ID NO: 1135 | VH - 5 | QVQLVQSGSELKKPGASVKVSCKASGFKTEDTY |
| | | MYWVRQAPGQGLEWIGRIDPANGNTKYDPKFQD |
| | | RAVISADSSVNTAYLQISSLKAEDTAVYYCARGS |
| | | YYYAMDYWGQGTLVTVSS |

Antibody H-H (humanized) VLs Binds to human TCRVβ 27

| | | |
|---|---|---|
| SEQ ID NO: 1136 | VL - 1 | DIVLTQSPDSLAVSLGERATINCRASESVDSYGNS |
| | | FMHWYQQKPGQPPKLLIYRASNLESGVPDRFSGS |
| | | GSRTDFTLTISSLQAEDVAVYYCQQSNEDPYTFG |
| | | QGTKLEIK |
| SEQ ID NO: 1137 | VL - 2 | EIVLTQSPATLSLSPGERATLSCRASESVDSYGNSF |
| | | MHWYQQKPGQAPKLLIYRASNLESGIPARFSGSG |
| | | SRTDFTLTISRLEPEDFAVYYCQQSNEDPYTFGQG |
| | | TKLEIK |
| SEQ ID NO: 1138 | VL - 3 | DIQLTQSPSSLSASVGDRVTITCRASESVDSYGNSF |
| | | MHWYQQKPGQAPKLLIYRASNLESGVPSRFSGSG |
| | | SRTDFTLTISSLQPEDVATYYCQQSNEDPYTFGQG |
| | | TKLEIK |
| SEQ ID NO: 1139 | VL - 4 | AIQLTQSPSSLSASVGDRVTITCRASESVDSYGNSF |
| | | MHWYQQKPGKAPKLLIYRASNLESGVPSRFSGSG |
| | | SRTDFTLTISSLQPEDFATYYCQQSNEDPYTFGQG |
| | | TKLEIK |
| SEQ ID NO: 1140 | VL - 5 | EIVLTQSPDFQSVTPKEKVTITCRASESVDSYGNSF |
| | | MHWYQQKPDQSPKLLIYRASNLESGVPSRFSGSG |
| | | SRTDFTLTINSLEAEDAATYYCQQSNEDPYTFGQG |
| | | TKLEIK |

Antibody I(murine) binds to human TCRVβ 6-5 ,6-6, 6-9

| | | |
|---|---|---|
| SEQ ID NO: 1141 | HC CDR1 (Kabat) | SYAMS |
| SEQ ID NO: 1142 | HC CDR2 (Kabat) | HISNGGDYIYYADTVKG |
| SEQ ID NO: 1143 | HC CDR3 (Kabat) | PSYYSDPWFFDV |
| SEQ ID NO: 1144 | HC CDR1 (Chothia | GFTFRSY |
| SEQ ID NO: 1145 | HC CDR2 (Chothia) | SNGGDY |
| SEQ ID NO: 1143 | HC CDR3 (Chothia) | PSYYSDPWFFDV |
| SEQ ID NO: 1146 | HC CDR1 (Combined) | GFTFRSYAMS |
| SEQ ID NO: 1142 | HC CDR2 (Combined) | HISNGGDYIYYADTVKG |
| SEQ ID NO: 1143 | HC CDR3(Combined) | PSYYSDPWFFDV |
| SEQ ID NO: 1147 | LC CDR1 (Kabat) | SAGSSVSFMH |
| SEQ ID NO: 1148 | LC CDR2 (Kabat) | DTSKLAS |
| SEQ ID NO: 1149 | LC CDR3 (Kabat) | LQGSGFPLT |
| SEQ ID NO: 1150 | LC CDR1 (Chothia) | GSSVSF |
| SEQ ID NO: 1148 | LC CDR2 (Chothia) | DTSKLAS |
| SEQ ID NO: 1149 | LC CDR3 (Chothia) | LQGSGFPLT |
| SEQ ID NO: 1147 | LC CDR1 (Combined) | SAGSSVSFMH |
| SEQ ID NO: 1148 | LC CDR2 (Combined) | DTSKLAS |
| SEQ ID NO: 1149 | LC CDR3(Combined) | LQGSGFPLT |
| SEQ ID NO: 1151 | VL | ENVLTQSPAIMSASPGEKVTMTCSAGSSVSFMHW |
| | | YQQKSSTSPKLWIYDTSKLASGVPGRFSGSGSGNS |
| | | FSLTISSMEAEDVAIYYCLQGSGFPLTFGSGTKLEI |
| SEQ ID NO: 1152 | VH | DVKLVESGEGLVKPGGSLKLSCAASGFTFRSYAM |
| | | SWVRQTPEKRLEWVAHISNGGDYIYYADTVKGR |
| | | FTISRDNARNTLYLQMSSLKSEDTAMYYCTRPSY |
| | | YSDPWFFDVWGTGTTVTVSS |

Antibody I-H (humanized) VHs
Binds to human TCRVβ 6-5, 6-6, 6-9

| | | |
|---|---|---|
| SEQ ID NO: 1153 | VH - 1 | EVQLVESGGGLVQPGGSLRLSCAASGFTFRSYAM |
| | | SWVRQAPGKGLEWVAHISNGGDYIYYADTVKGR |
| | | FTISRDNAKNSLYLQMNSLRAEDTAVYYCTRPSY |
| | | YSDPWFFDVWGQGTTVTVSS |
| SEQ ID NO: 1154 | VH - 2 | QVQLVESGGGVVQPGRSLRLSCAASGFTFRSYAM |
| | | SWVRQAPGKGLEWVAHISNGGDYIYYADTVKGR |
| | | FTISRDNSKNTLYLQMSSLRAEDTAVYYCTRPSY |
| | | YSDPWFFDVWGQGTTVTVSS |
| SEQ ID NO: 1155 | VH - 3 | EVQLVESGGGLVQPGGSLRLSCAASGFTFRSYAM |
| | | SWVRQAPGKGLEWVAHISNGGDYIYYADTVKGR |
| | | FTISRDNSKNTLYLQMNSLRAEDTAVYYCTRPSY |
| | | YSDPWFFDVWGQGTTVTVSS |
| SEQ ID NO: 1156 | VH - 4 | QVQLVQSGSELKKPGASVKVSCKASGFTFRSYAM |
| | | SWVRQAPGQGLEWVAHISNGGDYIYYADTVKGR |
| | | FVISRDNSVNTLYLQISSLKAEDTAVYYCTRPSYY |
| | | SDPWFFDVWGQGTTVTVSS |
| SEQ ID NO: 1157 | VH - 5 | QVQLVQSGAEVKKPGASVKVSCKASGFTFRSYA |
| | | MSWVRQAPGQRLEWVAHISNGGDYIYYADTVKG |
| | | RFTITRDNSANTLYMELSSLRSEDTAVYYCTRPSY |
| | | YSDPWFFDVWGQGTTVTVSS |

Antibody I-H (humanized) VLs
Binds to human TCRVβ 6-5, 6-6, 6-9

| | | |
|---|---|---|
| SEQ ID NO: 1158 | VL - 1 | ENVLTQSPATLSLSPGERATLSCSAGSSVSFMHW |
| | | YQQKPGQAPKLLIYDTSKLASGIPARFSGSGSGND |
| | | FTLTISSLEPEDFAVYYCLQGSGFPLTFGQGTKLEI |
| | | K |
| SEQ ID NO: 1159 | VL - 2 | ENVLTQSPDFQSVTPKEKVTITCSAGSSVSFMHW |
| | | YQQKPDQSPKLLIYDTSKLASGVPSRFSGSGSGND |
| | | FTLTINSLEAEDAATYYCLQGSGFPLTFGQGTKLEI |
| | | K |
| SEQ ID NO: 1160 | VL - 3 | DNQLTQSPSSLSASVGDRVTITCSAGSSVSFMHW |
| | | YQQKPGKVPKLLIYDTSKLASGVPSRFSGSGSGN |
| | | DFTLTISSLQPEDVATYYCLQGSGFPLTFGQGTKL |
| | | EIK |
| SEQ ID NO: 1161 | VL - 4 | ANQLTQSPSSLSASVGDRVTITCSAGSSVSFMHW |
| | | YQQKPGKAPKLLIYDTSKLASGVPSRFSGSGSGN |
| | | DFTLTISSLQPEDFATYYCLQGSGFPLTFGQGTKL |
| | | EIK |
| SEQ ID NO: 1162 | VL - 5 | DNVLTQSPDSLAVSLGERATINCSAGSSVSFMHW |
| | | YQQKPGQPPKLLIYDTSKLASGVPDRFSGSGSGN |
| | | DFTLTISSLQAEDVAVYYCLQGSGFPLTFGQGTKL |
| | | EIK |

Antibody IJ (murine), Binds to human TCRVβ 5-1

| | | |
|---|---|---|
| SEQ ID NO: 1163 | HC CDR1 (Kabat) | DYNIH |
| SEQ ID NO: 1164 | HC CDR2 (Kabat) | YINPYNGRTGYNQKFKA |
| SEQ ID NO: 1165 | HC CDR3 (Kabat) | WDGS SYFDY |
| SEQ ID NO: 1166 | HC CDR1 (Chothia) | GYTFTDYNIH |
| SEQ ID NO: 1167 | HC CDR2 (Chothia) | NPYNGR |
| SEQ ID NO: 1165 | HC CDR3 (Chothia) | WDGSSYFDY |
| SEQ ID NO: 1166 | HC CDR1 (Combined) | GYTFTDYNIH |
| SEQ ID NO: 1164 | HC CDR2 (Combined) | YINPYNGRTGYNQKFKA |
| SEQ ID NO: 1165 | HC CDR3(Combined) | WDGSSYFDY |
| SEQ ID NO: 1168 | LC CDR1 (Kabat) | SASS SVSYMH |
| SEQ ID NO: 1169 | LC CDR2 (Kabat) | EISKLAS |
| SEQ ID NO: 1170 | LC CDR3 (Kabat) | QQWNYPLLT |
| SEQ ID NO: 3476 | LC CDR1 (Chothia) | SSSVSY |
| SEQ ID NO: 1169 | LC CDR2 (Chothia) | EISKLAS |
| SEQ ID NO: 1170 | LC CDR3 (Chothia) | QQWNYPLLT |
| SEQ ID NO: 1168 | LC CDR1 (Combined) | SASSSVSYMH |
| SEQ ID NO: 1169 | LC CDR2 (Combined) | EISKLAS |
| SEQ ID NO: 1170 | LC CDR3(Combined) | QQWNYPLLT |
| SEQ ID NO: 1171 | VL | EIVLTQSPAITAASLGQKVTITCSASSSVSYMHWY |
| | | QQKSGTSPKPWIYEISKLASGVPARFSGSGSGTSY |
| | | SLTISSMEAEDAAIYYCQQWNYPLLTFGAGTKLE |
| | | LK |
| SEQ ID NO: 1172 | VH | EVQLQQSGPVLVKPGASVRMSCKASGYTFTDYNI |
| | | HWVKQSHGRSLEWVGYINPYNGRTGYNQKFKA |
| | | KATLTVDKSSSTAYMDLRSLTSEDSAVYYCARW |
| | | DGSSYFDYWGQGTTLTVSS |

Antibody J-H(humanized) VHs
Binds to human TCRVβ 5-1

| | | |
|---|---|---|
| SEQ ID NO: 1173 | VH - 1 | QVQLVQSGAEVKKPGSSVKVSCKASGYTFTDYNI |
| | | HWVRQAPGQGLEWVGYINPYNGRTGYNQKFKA |
| | | RATLTVDKSTSTAYMELSSLRSEDTAVYYCARW |
| | | DGSSYFDYWGQGTTVTVSS |
| SEQ ID NO: 1174 | VH - 2 | QVQLVQSGAEVKKPGASVKVSCKASGYTFTDYNI |
| | | HWVRQAPGQGLEWVGYINPYNGRTGYNQKFKA |
| | | RATLTVDKSTSTAYMELRSLRSDDMAVYYCARW |
| | | DGSSYFDYWGQGTTVTVSS |
| SEQ ID NO: 1175 | VH - 3 | QVQLVQSGAEVKKPGASVKVSCKASGYTFTDYNI |
| | | HWVRQATGQGLEWVGYINPYNGRTGYNQKFKA |
| | | RATLTVNKSISTAYMELSSLRSEDTAVYYCARWD |
| | | GSSYFDYWGQGTTVTVSS |
| SEQ ID NO: 1176 | VH - 4 | EVQLVESGGGLVQPGRSLRLSCTASGYTFTDYNI |
| | | HWVRQAPGKGLEWVGYINPYNGRTGYNQKFKA |
| | | RATLSVDKSKSIAYLQMNSLKTEDTAVYYCARW |
| | | DGSSYFDYWGQGTTVTVSS |
| SEQ ID NO: 1177 | VH - 5 | QVQLVQSGSELKKPGASVKVSCKASGYTFTDYNI |
| | | HWVRQAPGQGLEWVGYINPYNGRTGYNQKFKA |
| | | RAVLSVDKSVSTAYLQISSLKAEDTAVYYCARWD |
| | | GSSYFDYWGQGTTVTVSS |

Antibody J-H (humanized) VLs
Binds to human TCRVβ 5-1

| | | |
|---|---|---|
| SEQ ID NO: 1178 | VL - 1 | EIVLTQSPATLSLSPGERATLSCSASSSVSYMHWY |
| | | QQKPGQAPKLLIYEISKLASGIPARFSGSGSGTDYT |
| | | LTISSLEPEDFAVYYCQQWNYPLLTFGQGTKLEIK |
| SEQ ID NO: 1179 | VL - 2 | EIVLTQSPATLSLSPGERATLSCSASSSVSYMHWY |
| | | QQKPGQAPKLLIYEISKLASGIPARFSGSGSGTDYT |
| | | LTISRLEPEDFAVYYCQQWNYPLLTFGQGTKLEIK |
| SEQ ID NO: 1180 | VL - 3 | EIVLTQSPDFQSVTPKEKVTITCSASSSVSYMHWY |
| | | QQKPDQSPKLLIYEISKLASGVPSRFSGSGSGTDYT |
| | | LTTNSLEAEDAATYYCQQWNYPLLTFGQGTKLEI |
| | | K |
| SEQ ID NO: 1181 | VL - 4 | DIQLTQSPSFLSASVGDRVTITCSASSSVSYMHWY |
| | | QQKPGKAPKLLIYEISKLASGVPSRFSGSGSGTEY |
| | | TLTISSLQPEDFATYYCQQWNYPLLTFGQGTKLEI |
| | | K |
| SEQ ID NO: 1182 | VL - 5 | AIQLTQSPSSLSASVGDRVTITCSASSSVSYMHWY |
| | | QQKPGKAPKLLIYEISKLASGVPSRFSGSGSGTDY |
| | | TLTISSLQPEDFATYYCQQWNYPLLTFGQGTKLEI |
| | | K |
| SEQ ID NO: 1183 | VL - 6 | AIRLTQSPFSLSASVGDRVTITCSASSSVSYMHWY |
| | | QQKPAKAPKLFIYEISKLASGVPSRFSGSGSGTDY |
| | | TLTISSLQPEDFATYYCQQWNYPLLTFGQGTKLEI |
| | | K |
| SEQ ID NO: 1184 | VL - 7 | DIVLTQSPDSLAVSLGERATINCSASSSVSYMHWY |
| | | QQKPGQPPKLLIYEISKLASGVPDRFSGSGSGTDY |
| | | TLTISSLQAEDVAVYYCQQWNYPLLTFGQGTKLE |
| | | IK |

Antibody K (murine), binds to human TCRVβ 28

| | | |
|---|---|---|
| SEQ ID NO: 1185 | HC CDR1 (Kabat) | GSWMN |
| SEQ ID NO: 1186 | HC CDR2 (Kabat) | RIYPGDGDTDYSGKFKG |
| SEQ ID NO: 1187 | HC CDR3 (Kabat) | SGYFNYVPVFDY |
| SEQ ID NO: 1188 | HC CDR1 (Chothia) | GYTFSGS |
| SEQ ID NO: 1189 | HC CDR2 (Chothia) | YPGDGD |
| SEQ ID NO: 1187 | HC CDR3 (Chothia) | SGYFNYVPVFDY |
| SEQ ID NO: 1190 | HC CDR1 (Combined) | GYTFSGSWMN |
| SEQ ID NO: 1186 | HC CDR2 (Combined) | RIYPGDGDTDYSGKFKG |
| SEQ ID NO: 1187 | HC CDR3(Combined) | SGYFNYVPVFDY |
| SEQ ID NO: 1191 | LC CDR1 (Kabat) | SANSTVGYIH |
| SEQ ID NO: 1192 | LC CDR2 (Kabat) | TTSNLAS |
| SEQ ID NO: 1193 | LC CDR3 (Kabat) | HQWSFYPT |
| SEQ ID NO: 1194 | LC CDR1 (Chothia) | NSTVGY |
| SEQ ID NO: 1192 | LC CDR2 (Chothia) | TTSNLAS |
| SEQ ID NO: 1193 | LC CDR3 (Chothia) | HQWSFYPT |
| SEQ ID NO: 1191 | LC CDR1 (Combined) | SANSTVGYIH |
| SEQ ID NO: 1192 | LC CDR2 (Combined) | TTSNLAS |
| SEQ ID NO: 1193 | LC CDR3(Combined) | HQWSFYPT |
| SEQ ID NO: 1195 | VL | QIVLTQSPAIMSASLGEEIALTCSANSTVGYIHWY |
| | | QQKSGTSPKLLIYTTSNLASGVPSRFSGSGSGTFYS |
| | | LTISSVEAEDAADYFCHQWSFYPTFGGGTKLEIK |
| SEQ ID NO: 1196 | VH | QIQLQQSGPEVVKPGASVQISCKASGYTFSGSWM |
| | | NWVKQRPGKGLEWIGRIYPGDGDTDYSGKFKGR |
| | | ATLTADKSSSTAYMRLSSLTSEDSAVYFCARSGY |
| | | FNYVPVFDYWGQGTTLSVSS |

Antibody K-H(humanized) VHs
Binds to human TCRVβ 28

| | | |
|---|---|---|
| SEQ ID NO: 1197 | VH - 1 | QIQLVQSGAEVKKPGASVKVSCKASGYTFSGSW |
| | | MNWVRQAPGQGLEWIGRIYPGDGDTDYSGKFKG |
| | | RATLTADKSTSTAYMELSSLRSEDTAVYYCARSG |
| | | YFNYVPVFDYWGQGTTVTVSS |
| SEQ ID NO: 1198 | VH - 2 | QIQLVQSGAEVKKPGSSVKVSCKASGYTFSGSWM |
| | | NWVRQAPGQGLEWIGRIYPGDGDTDYSGKFKGR |
| | | ATLTADKSTSTAYMELSSLRSEDTAVYYCARSGY |
| | | FNYVPVFDYWGQGTTVTVSS |
| SEQ ID NO: 1199 | VH - 3 | EIQLVQSGAEVKKPGESLKISCKASGYTFSGSWM |
| | | NWVRQMPGKGLEWIGRIYPGDGDTDYSGKFKGQ |
| | | ATLSADKSISTAYLQWSSLKASDTAMYYCARSGY |
| | | FNYVPVFDYWGQGTTVTVSS |
| SEQ ID NO: 1200 | VH - 4 | QIQLVQSGSELKKPGASVKVSCKASGYTFSGSWM |
| | | NWVRQAPGQGLEWIGRIYPGDGDTDYSGKFKGR |
| | | AVLSADKSVSTAYLQISSLKAEDTAVYYCARSGY |
| | | FNYVPVFDYWGQGTTVTVSS |
| SEQ ID NO: 1201 | VH - 5 | QIQLVQSGSELKKPGASVKVSCKASGYTFSGSWM |
| | | NWVRQAPGQGLEWIGRIYPGDGDTDYSGKFKGR |
| | | AVLSADKSVSMAYLQISSLKAEDTAVYYCARSGY |
| | | FNYVPVFDYWGQGTTVTVSS |
| SEQ ID NO: 1202 | VH - 6 | EIQLVESGGGLVQPGRSLRLSCTASGYTFSGSWM |
| | | NWVRQAPGKGLEWIGRIYPGDGDTDYSGKFKGR |
| | | ATLSADKSKSIAYLQMNSLKTEDTAVYYCARSGY |
| | | FNYVPVFDYWGQGTTVTVSS |

Antibody K-H (humanized) VLs
Binds to human TCRVβ 28

| | | |
|---|---|---|
| SEQ ID NO: 1203 | VL - 1 | EIVLTQSPATLSLSPGERATLSCSANSTVGYIHWY |
| | | QQKPGQAPKLLIYTTSNLASGIPARFSGSGSGTDY |
| | | TLTISSLEPEDFAVYFCHQWSFYPTFGQGTKLEIK |
| SEQ ID NO: 1204 | VL - 2 | DIQLTQSPSFLSASVGDRVTITCSANSTVGYIHWY |
| | | QQKPGKAPKLLIYTTSNLASGVPSRFSGSGSGTEY |
| | | TLTISSLQPEDFATYFCHQWSFYPTFGQGTKLEIK |
| SEQ ID NO: 1205 | VL - 3 | EIVLTQSPATLSLSPGERATLSCSANSTVGYIHWY |
| | | QQKPGQAPKLLIYTTSNLASGIPARFSGSGPGTDY |
| | | TLTISSLEPEDFAVYFCHQWSFYPTFGQGTKLEIK |
| SEQ ID NO: 1206 | VL - 4 | DIVLTQSPDSLAVSLGERATINCSANSTVGYIHWY |
| | | QQKPGQPPKLLIYTTSNLASGVPDRFSGSGSGTDY |
| | | TLTISSLQAEDVAVYFCHQWSFYPTFGQGTKLEIK |
| SEQ ID NO: 1207 | VL - 5 | EIVLTQSPDFQSVTPKEKVTITCSANSTVGYIHWY |
| | | QQKPDQSPKLLIYTTSNLASGVPSRFSGSGSGTDY |
| | | TLTINSLEAEDAATYFCHQWSFYPTFGQGTKLEIK |

Antibody L (murine), binds to human TCRVβ 4-1, 4-2, 4-3

| | | |
|---|---|---|
| SEQ ID NO: 1208 | HC CDR1 (Kabat) | DYYMY |
| SEQ ID NO: 1209 | HC CDR2 (Kabat) | TISGGGSYTYSPD SVKG |
| SEQ ID NO: 1210 | HC CDR3 (Kabat) | ERDIYYGNFNAMVY |
| SEQ ID NO: 1211 | HC CDR1 (Chothia) | GFTFSDY |
| SEQ ID NO: 1212 | HC CDR2 (Chothia) | SGGGSY |
| SEQ ID NO: 1210 | HC CDR3 (Chothia) | ERDIYYGNFNAMVY |
| SEQ ID NO: 1213 | HC CDR1 (Combined) | GFTFSDYYMY |
| SEQ ID NO: 1209 | HC CDR2 (Combined) | TISGGGSYTYSPDSVKG |
| SEQ ID NO: 1210 | HC CDR3(Combined) | ERDIYYGNFNAMVY |
| SEQ ID NO: 1214 | LC CDR1 (Kabat) | RASKSVSTSGYSYMH |
| SEQ ID NO: 1215 | LC CDR2 (Kabat) | LASNLES |
| SEQ ID NO: 1216 | LC CDR3 (Kabat) | QHSRDLPWT |
| SEQ ID NO: 1217 | LC CDR1 (Chothia) | SKSVSTSGYSY |
| SEQ ID NO: 1215 | LC CDR2 (Chothia) | LASNLES |
| SEQ ID NO: 1216 | LC CDR3 (Chothia) | QHSRDLPWT |
| SEQ ID NO: 1214 | LC CDR1 (Combined) | RASKSVSTSGYSYMH |
| SEQ ID NO: 1215 | LC CDR2 (Combined) | LASNLES |
| SEQ ID NO: 1216 | LC CDR3(Combined) | QHSRDLPWT |
| SEQ ID NO: 1218 | VL | DIVLTQSPVSLTVSLGQRATISCRASKSVSTSGYSY |
| | | MHWYQQKPGQPPKLLIYLASNLESGVPARFSGSG |
| | | SGTDFTLNIHPVEEEDAATYYCQHSRDLPWTFGG |
| | | GTKLEIK |
| SEQ ID NO: 1219 | VH | EVQLVESGGGLVKPGGSLKLSCAASGFTFSDYYM |
| | | YWVRQTPEKRLEWVATISGGGSYTYSPDSVKGRF |
| | | TISRDNAKNNLYLQMSSLRSEDTAMYFCARERDI |
| | | YYGNFNAMVYWGRGTSVTVSS |

Antibody L-H (humanized) VHs
Binds to human TCRVβ 4-1, 4-2, 4-3

| | | |
|---|---|---|
| SEQ ID NO: 1220 | VH - 1 | EVQLLESGGGLVQPGGSLRLSCAASGFTFSDYYM |
| | | YWVRQAPGKGLEWVATISGGGSYTYSPDSVKGR |
| | | FTISRDNSKNTLYLQMNSLRAEDTAVYYCARERD |
| | | IYYGNFNAMVYWGRGTLVTVSS |
| SEQ ID NO: 1221 | VH - 2 | EVQLVESGGGLVQPGGSLRLSCAASGFTFSDYYM |
| | | YWVRQAPGKGLEWVATISGGGSYTYSPDSVKGR |
| | | FTISRDNAKNSLYLQMNSLRAEDTAVYYCARERD |
| | | IYYGNFNAMVYWGRGTLVTVSS |
| SEQ ID NO: 1222 | VH - 3 | QVQLVESGGGVVQPGRSLRLSCAASGFTFSDYY |
| | | MYWVRQAPGKGLEWVATISGGGSYTYSPDSVK |
| | | GRFTISRDNSKNTLYLQMNSLRAEDTAVYYCAR |
| | | ERDIYYGNFNAMVYWGRGTLVTVSS |
| SEQ ID NO: 1223 | VH - 4 | QVQLVESGGGLVKPGGSLRLSCAASGFTFSDYYM |
| | | YWIRQAPGKGLEWVATISGGGSYTYSPDSVKGRF |
| | | TISRDNAKNSLYLQMNSLRAEDTAVYYCARERDI |
| | | YYGNFNAMVYWGRGTLVTVSS |

Antibody L-H(humanized) VLs
Binds to human TCRVβ 4-1, 4-2, 4-3

| | | |
|---|---|---|
| SEQ ID NO: 1224 | VL - 1 | EIVLTQSPGTLSLSPGERATLSCRASKSVSTSGYSY |
| | | MHWYQQKPGQAPRLLIYLASNLESGIPDRFSGSG |
| | | SGTDFTLTISRLEPEDFAVYYCQHSRDLPWTFGGG |
| | | TKVEIK |
| SEQ ID NO: 1225 | VL - 2 | EIVLTQSPATLSLSPGERATLSCRASKSVSTSGYSY |
| | | MHWYQQKPGQAPRLLIYLASNLESGIPARFSGSG |
| | | SGTDFTLTISSLEPEDFAVYYCQHSRDLPWTFGGG |
| | | TKVEIK |
| SEQ ID NO: 1226 | VL - 3 | DIQLTQSPSTLSASVGDRVTITCRASKSVSTSGYSY |
| | | MHWYQQKPGKAPKLLIYLASNLESGVPSRFSGSG |
| | | SGTEFTLTISSLQPDDFATYYCQHSRDLPWTFGGG |
| | | TKVEIK |
| SEQ ID NO: 1227 | VL - 4 | AIQLTQSPSSLSASVGDRVTITCRASKSVSTSGYSY |
| | | MHWYQQKPGKAPKWYLASNLESGVPSRFSGSG |
| | | SGTDFTLTISSLQPEDFATYYCQHSRDLPWTFGGG |
| | | TKVEIK |

Antibody M (murine), binds to human TCRVβ 19

| | | |
|---|---|---|
| SEQ ID NO: 1229 | HC CDR1 (Kabat) | GYFWN |
| SEQ ID NO: 1230 | HC CDR2 (Kabat) | YISYDGSNNYNPSLKN |
| SEQ ID NO: 1231 | HC CDR3 (Kabat) | PSPGTGYAVDY |
| SEQ ID NO: 1232 | HC CDR1 (Chothia) | GYSITSGY |
| SEQ ID NO: 1233 | HC CDR2 (Chothia) | SYDGSN |
| SEQ ID NO: 1231 | HC CDR3 (Chothia) | PSPGTGYAVDY |
| SEQ ID NO: 1234 | HC CDR1 (Combined) | GYSITSGYFWN |
| SEQ ID NO: 1230 | HC CDR2 (Combined) | YISYDGSNNYNPSLKN |
| SEQ ID NO: 1231 | HC CDR3(Combined) | PSPGTGYAVDY |
| SEQ ID NO: 1235 | LC CDR1 (Kabat) | RSSQSLVHSNGNTYLH |
| SEQ ID NO: 1236 | LC CDR2 (Kabat) | KVSNRFS |
| SEQ ID NO: 1237 | LC CDR3 (Kabat) | SQSTHVPFT |
| SEQ ID NO: 1238 | LC CDR1 (Chothia) | SQSLVHSNGNTY |
| SEQ ID NO: 1236 | LC CDR2 (Chothia) | KVSNRFS |
| SEQ ID NO: 1237 | LC CDR3 (Chothia) | SQSTHVPFT |
| SEQ ID NO: 1235 | LC CDR1 (Combined) | RSSQSLVHSNGNTYLH |
| SEQ ID NO: 1236 | LC CDR2 (Combined) | KVSNRFS |
| SEQ ID NO: 1237 | LC CDR3(Combined) | SQSTHVPFT |
| SEQ ID NO: 1239 | VL | NVVMTQTPLSLPVSLGDQASISCRSSQSLVHSNGN |
| | | TYLHWYLQKPGQSPKFLIYKVSNRFSGVPDRFSG |
| | | GGSGTEFTLKISRVEAEDLGVYFCSQSTHVPFTFG |
| | | SGTKLEIK |
| SEQ ID NO: 1240 | VH | NVQLQESGPGLVKPSQSLSLTCSVAGYSITSGYFW |
| | | NWIRQFPGNKLEWMGYISYDGSNNYNPSLKNRIS |
| | | ITRDTSKNQFFLKLNSVTTEDTATYYCASPSPGTG |
| | | YAVDYWGQGTSVTVSS |

Antibody M-H (humanized) VHs
Binds to human TCRVβ 19

| | | |
|---|---|---|
| SEQ ID NO: 1241 | VH - 1 | QVQLQESGPGLVKPSETLSLTCTVSGYSITSGYFW |
| | | NWIRQPPGKGLEWIGYISYDGSNNYNPSLKNRVTI |
| | | SRDTSKNQFSLKLSSVTAADTAVYYCASPSPGTG |
| | | YAVDYWGQGTLVTVSS |
| SEQ ID NO: 1242 | VH - 2 | QVQLQESGPGLVKPSETLSLTCTVSGYSITSGYFW |
| | | NWIRQPPGKGLEWIGYISYDGSNNYNPSLKNRVTI |
| | | SRDTSKNQFSLKLSSVTAADTAVYYCASPSPGTG |
| | | YAVDYWGQGTLVTVSS |
| SEQ ID NO: 1243 | VH - 3 | QVQLVESGGGLVQPGGSLRLSCSVSGYSITSGYF |
| | | WNWVRQAPGKGLEWVGYISYDGSNNYNPSLKN |
| | | RFTISRDTSKNTFYLQMNSLRAEDTAVYYCASPSP |
| | | GTGYAVDYWGQGTLVTVSS |

Antibody M - H (humanized) VLs
Binds to human TCRVβ 19

| | | |
|---|---|---|
| SEQ ID NO: 1244 | VL - 1 | VVMTQSPGTLSLSPGERATLSCRSSQSLVHSNGNT |
| | | YLHWYQQKPGQAPRFLIYKVSNRFSGIPDRFSGSG |
| | | SGTDFTLTISRLEPEDFAVYFCSQSTHVPFTFGQGT |
| | | KLEIK |
| SEQ ID NO: 1245 | VL - 2 | EVVMTQSPATLSLSPGERATLSCRSSQSLVHSNGN |
| | | TYLHWYQQKPGQAPRFLIYKVSNRFSGIPARFSGS |
| | | GSGTDFTLTISSLEPEDFAVYFCSQSTHVPFTFGQG |
| | | TKLEIK |
| SEQ ID NO: 1246 | VL - 3 | EVVMTQSPATLSVSPGERATLSCRSSQSLVHSNG |
| | | NTYLHWYQQKPGQAPRFLIYKVSNRFSGIPARFS |
| | | GSGSGTEFTLTISSLQSEDFAVYFCSQSTHVPFTFG |
| | | QGTKLEIK |
| SEQ ID NO: 1247 | VL - 4 | DVQMTQSPSSLSASVGDRVTITCRSSQSLVHSNGN |
| | | TYLHWYQQKPGKAPKFLIYKVSNRFSGVPSRFSG |
| | | SGSGTDFTFTISSLQPEDIATYFCSQSTHVPFTFGQ |
| | | GTKLEIK |

Antibody N(murine) binds to human TCRVβ 9

| | | |
|---|---|---|
| SEQ ID NO: 1248 | HC CDR1 (Kabat) | DYIVH |
| SEQ ID NO: 1249 | HC CDR2 (Kabat) | WINTYTGTPTYADDFEG |
| SEQ ID NO: 1250 | HC CDR3 (Kabat) | SWRRGIRGIGFDY |
| SEQ ID NO: 1251 | HC CDR1 (Chothia) | GYTFTDY |
| SEQ ID NO: 1252 | HC CDR2 (Chothia) | NTYTGT |
| SEQ ID NO: 1250 | HC CDR3 (Chothia) | SWRRGIRGIGFDY |
| SEQ ID NO: 1253 | HC CDR1 (Combined) | GYTFTDYIVH |
| SEQ ID NO: 1249 | HC CDR2 (Combined) | WINTYTGTPTYADDFEG |
| SEQ ID NO: 1250 | HC CDR3(Combined) | SWRRGIRGIGFDY |
| SEQ ID NO: 1254 | LC CDR1 (Kabat) | KASKSINKYLA |
| SEQ ID NO: 1255 | LC CDR2 (Kabat) | DGSTLQS |
| SEQ ID NO: 1256 | LC CDR3 (Kabat) | QQHNEYPPT |
| SEQ ID NO: 1257 | LC CDR1 (Chothia) | SKSINKY |
| SEQ ID NO: 1255 | LC CDR2 (Chothia) | DGSTLQS |
| SEQ ID NO: 1256 | LC CDR3 (Chothia) | QQHNEYPPT |
| SEQ ID NO: 1254 | LC CDR1 (Combined) | KASKSINKYLA |
| SEQ ID NO: 1255 | LC CDR2 (Combined) | DGSTLQS |
| SEQ ID NO: 1256 | LC CDR3(Combined) | QQHNEYPPT |
| SEQ ID NO: 1258 | VL | DVQMTQSPYNLAASPGESVSINCKASKSINKYLA |
| | | WYQQKPGKPNKLLIYDGSTLQSGIPSRFSGSGSGT |
| | | DFTLTIRGLEPEDFGLYYCQQHNEYPPTFGAGTKL |
| | | ELK |
| SEQ ID NO: 1259 | VH | QLQLVQSGPELREPGESVKISCKASGYTFTDYIVH |
| | | WVKQAPGKGLKWMGWINTYTGTPTYADDFEGR |
| | | FVFSLEASASTANLQISNLKNEDTATYFCARSWRR |
| | | GIRGIGFDYWGQGVMVTVSS |

Antibody N-H (humanized) VH's
Binds to human TCRVβ 9

| | | |
|---|---|---|
| SEQ ID NO: 1260 | VH - 1 | QLQLVQSGAEVKKPGASVKVSCKASGYTFTDYIV |
| | | HWVRQAPGQGLEWMGWINTYTGTPTYADDFEG |
| | | WVTMTLDASISTAYMELSRLRSDDTAVYYCARS |
| | | WRRGIRGIGFDYWGQGTMVTVSS |
| SEQ ID NO: 1261 | VH - 2 | QLQLVQSGAEVKKPGASVKVSCKASGYTFTDYIV |
| | | HWVRQAPGQGLEWMGWINTYTGTPTYADDFEG |
| | | RVTMTLDASTSTAYMELSSLRSEDTAVYYCARS |
| | | WRRGIRGIGFDYWGQGTMVTVSS |
| SEQ ID NO: 1262 | VH - 3 | QLQLVQSGAEVKKPGASVKVSCKASGYTFTDYIV |
| | | HWVRQAPGQRLEWMGWINTYTGTPTYADDFEG |
| | | RVTITLDASASTAYMELSSLRSEDMAVYYCARSW |
| | | RRGIRGIGFDYWGQGTMVTVSS |
| SEQ ID NO: 1263 | VH - 4 | QLQLVQSGAEVKKPGASVKVSCKASGYTFTDYIV |
| | | HWVRQATGQGLEWMGWINTYTGTPTYADDFEG |
| | | RVTMTLNASISTAYMELSSLRSEDTAVYYCARSW |
| | | RRGIRGIGFDYWGQGTMVTVSS |

Antibody N-H (humanized) VL's
Binds to human TCRVβ 9

| | | |
|---|---|---|
| SEQ ID NO: 1264 | VL - 1 | EVVMTQSPGTLSLSPGERATLSCKASKSNKYLA |
| | | WYQQKPGQAPRLLIYDGSTLQSGIPDRFSGSGSGT |
| | | DFTLTISRLEPEDFAVYYCQQHNEYPPTFGQGTKL |
| | | EIK |
| SEQ ID NO: 1265 | VL - 2 | EVVMTQSPATLSLSPGERATLSCKASKSINKYLA |
| | | WYQQKPGQAPRLLIYDGSTLQSGIPARFSGSGSGT |
| | | DFTLTISSLEPEDFAVYYCQQHNEYPPTFGQGTKL |
| | | EIK |
| SEQ ID NO: 1266 | VL - 3 | DVQMTQSPSSLSASVGDRVTITCKASKSINKYLA |
| | | WYQQKPGKAPKLLIYDGSTLQSGVPSRFSGSGSG |
| | | TDFTLTISSLQPEDFATYYCQQHNEYPPTFGQGTK |
| | | LEIK |
| SEQ ID NO: 1267 | VL - 4 | AVRMTQSPSSFSASTGDRVTITCKASKSINKYLAW |
| | | YQQKPGKAPKLLIYDGSTLQSGVPSRFSGSGSGTD |
| | | FTLTISCLQSEDFATYYCQQHNEYPPTFGQGTKLE |
| | | IK |

Antibody O (murine) binds to TRVβ 11-2

| | | |
|---|---|---|
| SEQ ID NO: 1268 | HC CDR1 (Kabat) | NYGVH |
| SEQ ID NO: 1269 | HC CDR2 (Kabat) | VIWSDGSTDYDTAFIS |
| SEQ ID NO: 1270 | HC CDR3 (Kabat) | RAVVADFDY |
| SEQ ID NO: 1271 | HC CDR1 (Chothia) | GFSLTN |
| SEQ ID NO: 1272 | HC CDR2 (Chothia) | VIWSDGSTD |
| SEQ ID NO: 1270 | HC CDR3 (Chothia) | RAVVADFDY |
| SEQ ID NO: 1273 | HC CDR1 (combined) | GFSLTNYGVH |
| SEQ ID NO: 1269 | HC CDR2 (combined) | VIWSDGSTDYDTAFIS |
| SEQ ID NO: 1270 | HC CDR3 (combined) | RAVVADFDY |
| SEQ ID NO: 1274 | VH | QVQLKQSGPGLLQPSQSLSITCTVSGFSLTNYGVH |
| | | WVRQSPGKGLEWLGVIWSDGSTDYDTAFISRLSIS |
| | | KDNSKSQVFFKLNSLQADDTAIYYCARRAVVADF |
| | | DYWGQGTTLTVSS |
| SEQ ID NO: 1275 | LC CDR1 (Kabat) | KASKEVTIFGSISALH |
| SEQ ID NO: 1276 | LC CDR2 (Kabat) | NGAKLES |
| SEQ ID NO: 1277 | LC CDR3 (Kabat) | LQNKEVPFT |
| SEQ ID NO: 1275 | LC CDR1 (Chothia) | KASKEVTIFGSISALH |
| SEQ ID NO: 1276 | LC CDR2 (Chothia) | NGAKLES |
| SEQ ID NO: 1277 | LC CDR3 (Chothia) | LQNKEVPFT |
| SEQ ID NO: 1275 | LC CDR1 (combined) | KASKEVTIFGSISALH |
| SEQ ID NO: 1276 | LC CDR2 (combined) | NGAKLES |
| SEQ ID NO: 1277 | LC CDR3 (combined) | LQNKEVPFT |
| SEQ ID NO: 1278 | VL | DIVLTQSPASLAVSLGQKATISCKASKEVTIFGSIS |
| | | ALHWYQQKPGQPPKLIYNGAKLESGVSARFSDS |
| | | GSQNRSPFGNQLSFTLTIAPVEADDAATYYCLQN |
| | | KEVPFTFGSGTKLEIK |

Antibody O-H (humanized) VL binds to TRVβ 11-2

| | | |
|---|---|---|
| SEQ ID NO: 1279 | VL-1 | DIVLTQSPDSLAVSLGERATINCKASKEVTIFGSIS |
| | | ALHWYQQKPGQPPKLLYNGAKLESGVSARFGVP |
| | | DRFSRSGSGLDFTLTISSLQAEDVAVYYCLQNKE |
| | | VPFTFGQGTKLEIK |
| SEQ ID NO: 1280 | VL-2 | EIVLTQSPDFQSVTPKEKVTITCKASKEVTIFGSIS |
| | | ALHWYQQKPDQSPKLLYNGAKLESGVSARFGVP |
| | | SRF SRSGSGLDFTLTINSLEAEDAATYYCLQNKE |
| | | VPFTFGQGTKLEIK |
| SEQ ID NO: 1281 | VL-3 | AIQLTQSPSSLSASVGDRVTITCKASKEVTIFGSIS |
| | | ALHWYQQKPGKAPKLLYNGAKLESGVSARFGV |
| | | PSRFSRSGSGLDFTLTISSLQPEDFATYYCLQNKE |
| | | VPFTFGQGTKLEIK |
| SEQ ID NO: 1282 | VL-4 | DIVLTQTPLSLSVTPGQPASISCKASKEVTIFGSIS |
| | | ALHWYLQKPGQPPKLLYNGAKLESGVSARFGVP |
| | | DRFSRSGSGLDFTLKISRVEAEDVGVYYCLQNKE |
| | | VPFTFGQGTKLEIK |

Antibody O-H (humanized) VH, binds to TRVβ 11-2

| | | |
|---|---|---|
| SEQ ID NO: 1283 | VH-1 | QVTLKESGPVLVKPTETLTLTCTVSGFSLTNYGV |
| | | HWVRQPPGKALEWLGVIWSDGSTDYDTAFISRL |
| | | TISKDNSKSQVVLTMTNMDPVDTATYYCARRAV |
| | | VADFDYWGQGTTVTVSS |
| SEQ ID NO: 1284 | VH-2 | QVQLQESGPGLVKPSGTLSLTCAVSGFSLTNYGV |
| | | HWVRQPPGKGLEWLGVIWSDGSTDYDTAFISRL |
| | | TISKDNSKSQVSLKLSSVTAADTAVYYCARRAV |
| | | VADFDYWGQGTTVTVSS |
| SEQ ID NO: 1285 | VH-3 | QVQLQQSGPGLVKPSQTLSLTCAVSGFSLTNYGV |
| | | HWVRQSPSRGLEWLGVIWSDGSTDYDTAFISRL |
| | | TINKDNSKSQVSLQLNSVTPEDTAVYYCARRAV |
| | | VADFDYWGQGTTVTVSS |
| SEQ ID NO: 1286 | VH-4 | EVQLVESGGGLVQPGPSLRLSCTVSGFSLTNYGV |
| | | HWVRQAPGKGLEWLGVIWSDGSTDYDTAFISRL |
| | | TISKDNSKSIVYLQMNSLKTEDTAVYYCARRAV |
| | | VADFDYWGQGTTVTVSS |
| SEQ ID NO: 1287 | VH-5 | EVQLVQSGAEVKKPGESLRISCKVSGFSLTNYGV |
| | | HWVRQMPGKGLEWLGVIWSDGSTDYDTAFISQ |
| | | LTISKDNSISTVYLQWSSLKASDTAMYYCARRA |
| | | VVADFDYWGQGTTVTVSS |

[0867] Amino acid and nucleotide sequences for murine and humanized antibody molecules which bind to various TCRVB families are disclosed. The amino acid the heavy and light chain CDRs, and the amino acid and nucleotide sequences of the heavy and light chain variable regions, and the heavy and light chains are shown. Antibodies disclosed in the table include, MPB2D5, CAS1.1.3, IMMU222, REA1062, and JOVI-3. MPB2D5 binds human TCRβV 20-1 (TCRβV2 per old nomenclature). CAS1.1.3 binds human TCRβV 27 (TCRβV14 per old nomenclature). IMMU 222 binds human TCRβV 6-5, TCRβV 6-6, or TCRβV 6-9 (TCRβV13.1 per old nomenclature). REA1062 binds human TCRβV 5-1). JOVI-3 binds human TCRβV 28 (TCRβV3.1 per old nomenclature).

### Anti-TCRVβ Antibody Effector Function and Fc Variants

[0868] In some embodiments, an anti-TCRVβ antibody disclosed herein comprises an Fc region, e.g., as described herein. In some embodiments, the Fc region is a wildtype Fc region, e.g., a wildtype human Fc region. In some embodiments, the Fc region comprises a variant, e.g., an Fc region comprising an addition, substitution, or deletion of at least one amino acid residue in the Fc region which results in, e.g., reduced or ablated affinity for at least one Fc receptor.

[0869] The Fc region of an antibody interacts with a number of receptors or ligands including Fc Receptors (e.g., FcyRI, FcyRIIA, FcyRIIIA), the complement protein C1q, and other molecules such as proteins A and G. These interactions are essential for a variety of effector functions and downstream signaling events including: antibody dependent cell-mediated cytotoxicity (ADCC), Antibody-dependent cellular phagocytosis (ADCP) and complement dependent cytotoxicity (CDC).

[0870] In some embodiments, an anti-TCRVβ antibody comprising a variant Fc region has reduced, e.g., ablated, affinity for an Fc receptor, e.g., an Fc receptor described herein. In some embodiments, the reduced affinity is compared to an otherwise similar antibody with a wildtype Fc region.

[0871] In some embodiments, an anti-TCRVβ antibody comprising a variant Fc region has one or more of the following properties: (1) reduced effector function (e.g., reduced ADCC, ADCP and/or CDC); (2) reduced binding to one or more Fc receptors; and/or (3) reduced binding to C1q complement. In some embodiments, the reduction in any one, or all of properties (1)-(3) is compared to an otherwise similar antibody with a wildtype Fc region.

[0872] In some embodiments, an anti-TCRVβ antibody comprising a variant Fc region has reduced affinity to a human Fc receptor, e.g., FcyR I, FcyR II and/or FcyR III. In some embodiments, the anti-TCRVβ antibody comprising a variant Fc region comprises a human IgG1 region or a human IgG4 region.

[0873] In some embodiments, an anti-TCRVβ antibody comprising a variant Fc region activates and/or expands T cells, e.g., as described herein. In some embodiments, an anti-TCRVβ antibody comprising a variant Fc region has a cytokine profile described herein, e.g., a cytokine profile that differs from a cytokine profile of a T cell engager that binds to a receptor or molecule other than a TCRβV region (“a non-TCRβV-binding T cell engager”). In some embodiments, the non-TCRβV-binding T cell engager comprises an antibody that binds to a CD3 molecule (e.g., CD3 epsilon (CD3e) molecule); or a TCR alpha (TCRα) molecule.

[0874] Exemplary Fc region variants are provided in Table 10 and also disclosed in Saunders O, (2019) Frontiers in Immunology; vol 10, article1296, the entire contents of which is hereby incorporated by reference.

[0875] In some embodiments, an anti-TCRVβ antibody disclosed herein comprises any one or all, or any combination of Fc region variants, e.g., mutations, disclosed in Table 10. In some embodiments, an anti-TCRVβ antibody disclosed herein comprise an Asn297Ala (N297A) mutation. In some embodiments, an anti-TCRVβ antibody disclosed herein comprise a Leu234A1a/Leu235Ala (LALA) mutation.

TABLE 10
Exemplary Fc modifications

| Modification or mutation | Altered effector function |
|---|---|
| Leu235Glu | ADCC; |
| Leu234Ala/Leu235A1a (LALA) | ADCC; ADCP; CDC |
| Ser228Pro/Leu235Glu | |
| Leu234Ala/Leu235Ala/Pro329G1y | ADCP |
| Pro331Ser/Leu234Glu/Leu235Phe | CDC |
| Asp265Ala | ADCC, ADCP |
| Gly237Ala | ADCP |
| Glu318Ala | ADCP |
| Glu233Pro | |
| Gly236Arg/Leu328Arg | ADCC |
| His268GlnNa1309Leu/Ala330Ser/Pro331Ser | ADCC; ADCP; CDC |
| Val234A1a/Gly237Ala/Pro238Ser/ | ADCC; ADCP; CDC |
| His268Ala/Va1309Leu/Ala330Ser/Pro331Ser | |
| Leu234Ala/L235Ala/Gly237Ala/P238Ser/ | ADCC; CDC |
| His268A1a/Ala330 Ser/Pro331 Ser | |
| Ala330Leu | CDC |
| Asp270Ala | CDC |
| Lys322Ala | CDC |
| Pro329Ala | CDC |
| Pro331Ala | CDC |
| Val264Ala | CDC |
| High mannose glycosylation | CDC |
| Phe241Ala | CDC |
| Asn297Ala or Gly or Gln | ADCC; ADCP; CDC |
| S228P/Phe234Ala/Leu235Ala | ADCC; CDC |

### Antibody Molecules

[0876] In one embodiment, the antibody molecule binds to an infectious disease antigen, e.g., as described herein. In some embodiments, the antigen is, e.g., a bacterial, viral, fungal, or malarial antigen. In other embodiments, the antibody molecule binds to an immune cell antigen, e.g., a mammalian, e.g., a human, immune cell antigen. For example, the antibody molecule binds specifically to an epitope, e.g., linear or conformational epitope, on the infectious disease antigen or the immune cell antigen.

[0877] In an embodiment, an antibody molecule is a monospecific antibody molecule and binds a single epitope. E.g., a monospecific antibody molecule having a plurality of immunoglobulin variable domain sequences, each of which binds the same epitope.

[0878] In an embodiment an antibody molecule is a multispecific or multifunctional antibody molecule, e.g., it comprises a plurality of immunoglobulin variable domains sequences, wherein a first immunoglobulin variable domain sequence of the plurality has binding specificity for a first epitope and a second immunoglobulin variable domain sequence of the plurality has binding specificity for a second epitope. In an embodiment the first and second epitopes are on the same antigen, e.g., the same protein (or subunit of a multimeric protein). In an embodiment the first and second epitopes overlap. In an embodiment the first and second epitopes do not overlap. In an embodiment the first and second epitopes are on different antigens, e.g., the different proteins (or different subunits of a multimeric protein). In an embodiment a multispecific antibody molecule comprises a third, fourth or fifth immunoglobulin variable domain. In an embodiment, a multispecific antibody molecule is a bispecific antibody molecule, a trispecific antibody molecule, or a tetraspecific antibody molecule.

[0879] In an embodiment a multispecific antibody molecule is a bispecific antibody molecule. A bispecific antibody has specificity for no more than two antigens. A bispecific antibody molecule is characterized by a first immunoglobulin variable domain sequence which has binding specificity for a first epitope and a second immunoglobulin variable domain sequence that has binding specificity for a second epitope. In an embodiment the first and second epitopes are on the same antigen, e.g., the same protein (or subunit of a multimeric protein). In an embodiment the first and second epitopes overlap. In an embodiment the first and second epitopes do not overlap. In an embodiment the first and second epitopes are on different antigens, e.g., the different proteins (or different subunits of a multimeric protein). In an embodiment a bispecific antibody molecule comprises a heavy chain variable domain sequence and a light chain variable domain sequence which have binding specificity for a first epitope and a heavy chain variable domain sequence and a light chain variable domain sequence which have binding specificity for a second epitope. In an embodiment a bispecific antibody molecule comprises a half antibody having binding specificity for a first epitope and a half antibody having binding specificity for a second epitope. In an embodiment a bispecific antibody molecule comprises a half antibody, or fragment thereof, having binding specificity for a first epitope and a half antibody, or fragment thereof, having binding specificity for a second epitope. In an embodiment a bispecific antibody molecule comprises a scFv or a Fab, or fragment thereof, have binding specificity for a first epitope and a scFv or a Fab, or fragment thereof, have binding specificity for a second epitope.

[0880] In an embodiment, an antibody molecule comprises a diabody, and a single-chain molecule, as well as an antigen-binding fragment of an antibody (e.g., Fab, F(ab′)₂, and Fv). For example, an antibody molecule can include a heavy (H) chain variable domain sequence (abbreviated herein as VH), and a light (L) chain variable domain sequence (abbreviated herein as VL). In an embodiment an antibody molecule comprises or consists of a heavy chain and a light chain (referred to herein as a half antibody. In another example, an antibody molecule includes two heavy (H) chain variable domain sequences and two light (L) chain variable domain sequence, thereby forming two antigen binding sites, such as Fab, Fab′, F(ab′)₂, Fc, Fd, Fd′, Fv, single chain antibodies (scFv for example), single variable domain antibodies, diabodies (Dab) (bivalent and bispecific), and chimeric (e.g., humanized) antibodies, which may be produced by the modification of whole antibodies or those synthesized de novo using recombinant DNA technologies. These functional antibody fragments retain the ability to selectively bind with their respective antigen or receptor. Antibodies and antibody fragments can be from any class of antibodies including, but not limited to, IgG, IgA, IgM, IgD, and IgE, and from any subclass (e.g., IgG1, IgG2, IgG3, and IgG4) of antibodies. The a preparation of antibody molecules can be monoclonal or polyclonal. An antibody molecule can also be a human, humanized, CDR-grafted, or in vitro generated antibody. The antibody can have a heavy chain constant region chosen from, e.g., IgG1, IgG2, IgG3, or IgG4. The antibody can also have a light chain chosen from, e.g., kappa or lambda. The term “immunoglobulin” (Ig) is used interchangeably with the term “antibody” herein.

[0881] Examples of antigen-binding fragments of an antibody molecule include: (i) a Fab fragment, a monovalent fragment consisting of the VL, VH, CL and CH1 domains; (ii) a F(ab′)₂ fragment, a bivalent fragment comprising two Fab fragments linked by a disulfide bridge at the hinge region; (iii) a Fd fragment consisting of the VH and CH1 domains; (iv) a Fv fragment consisting of the VL and VH domains of a single arm of an antibody, (v) a diabody (dAb) fragment, which consists of a VH domain; (vi) a camelid or camelized variable domain; (vii) a single chain Fv (scFv), see e.g., Bird et al. (1988) Science 242:423-426; and Huston et al. (1988) Proc. Natl. Acad. Sci. USA 85:5879-5883); (viii) a single domain antibody. These antibody fragments are obtained using conventional techniques known to those with skill in the art, and the fragments are screened for utility in the same manner as are intact antibodies.

[0882] Antibody molecules include intact molecules as well as functional fragments thereof. Constant regions of the antibody molecules can be altered, e.g., mutated, to modify the properties of the antibody (e.g., to increase or decrease one or more of: Fc receptor binding, antibody glycosylation, the number of cysteine residues, effector cell function, or complement function).

[0883] Antibody molecules can also be single domain antibodies. Single domain antibodies can include antibodies whose complementary determining regions are part of a single domain polypeptide. Examples include, but are not limited to, heavy chain antibodies, antibodies naturally devoid of light chains, single domain antibodies derived from conventional 4-chain antibodies, engineered antibodies and single domain scaffolds other than those derived from antibodies. Single domain antibodies may be any of the art, or any future single domain antibodies. Single domain antibodies may be derived from any species including, but not limited to mouse, human, camel, llama, fish, shark, goat, rabbit, and bovine. According to another aspect of the invention, a single domain antibody is a naturally occurring single domain antibody known as heavy chain antibody devoid of light chains. Such single domain antibodies are disclosed in WO 9404678, for example. For clarity reasons, this variable domain derived from a heavy chain antibody naturally devoid of light chain is known herein as a VHH or nanobody to distinguish it from the conventional VH of four chain immunoglobulins. Such a VHH molecule can be derived from antibodies raised in Camelidae species, for example in camel, llama, dromedary, alpaca and guanaco. Other species besides Camelidae may produce heavy chain antibodies naturally devoid of light chain; such VHHs are within the scope of the invention.

[0884] The VH and VL regions can be subdivided into regions of hypervariability, termed “complementarity determining regions” (CDR), interspersed with regions that are more conserved, termed “framework regions” (FR or FW).

[0885] The extent of the framework region and CDRs has been precisely defined by a number of methods (see, Kabat, E. A., et al. (1991) Sequences of Proteins of Immunological Interest, Fifth Edition, U.S. Department of Health and Human Services, NIH Publication No. 91-3242; Chothia, C. et al. (1987) J. Mol. Biol. 196:901-917; and the AbM definition used by Oxford Molecular's AbM antibody modeling software. See, generally, e.g., Protein Sequence and Structure Analysis of Antibody Variable Domains. In: Antibody Engineering Lab Manual (Ed.: Duebel, S. and Kontermann, R., Springer-Verlag, Heidelberg).

[0886] The terms “complementarity determining region,” and “CDR,” as used herein refer to the sequences of amino acids within antibody variable regions which confer antigen specificity and binding affinity. In general, there are three CDRs in each heavy chain variable region (HCDR1, HCDR2, HCDR3) and three CDRs in each light chain variable region (LCDR1, LCDR2, LCDR3).

[0887] The precise amino acid sequence boundaries of a given CDR can be determined using any of a number of known schemes, including those described by Kabat et al. (1991), “Sequences of Proteins of Immunological Interest,” 5th Ed. Public Health Service, National Institutes of Health, Bethesda, Md. (“Kabat” numbering scheme), Al-Lazikani et al., (1997) JMB 273,927-948 (“Chothia” numbering scheme). As used herein, the CDRs defined according the “Chothia” number scheme are also sometimes referred to as “hypervariable loops.”

[0888] For example, under Kabat, the CDR amino acid residues in the heavy chain variable domain (VH) are numbered 31-35 (HCDR1), 50-65 (HCDR2), and 95-102 (HCDR3); and the CDR amino acid residues in the light chain variable domain (VL) are numbered 24-34 (LCDR1), 50-56 (LCDR2), and 89-97 (LCDR3). Under Chothia, the CDR amino acids in the VH are numbered 26-32 (HCDR1), 52-56 (HCDR2), and 95-102 (HCDR3); and the amino acid residues in VL are numbered 26-32 (LCDR1), 50-52 (LCDR2), and 91-96 (LCDR3).

[0889] Each VH and VL typically includes three CDRs and four FRs, arranged from amino-terminus to carboxy-terminus in the following order: FR1, CDR1, FR2, CDR2, FR3, CDR3, FR4.

[0890] The antibody molecule can be a polyclonal or a monoclonal antibody.

[0891] The terms “monoclonal antibody” or “monoclonal antibody composition” as used herein refer to a preparation of antibody molecules of single molecular composition. A monoclonal antibody composition displays a single binding specificity and affinity for a particular epitope. A monoclonal antibody can be made by hybridoma technology or by methods that do not use hybridoma technology (e.g., recombinant methods).

[0892] The antibody can be recombinantly produced, e.g., produced by phage display or by combinatorial methods.

[0893] Phage display and combinatorial methods for generating antibodies are known in the art (as described in, e.g., Ladner et al. U.S. Pat. No. 5,223,409; Kang et al. International Publication No. WO 92/18619; Dower et al. International Publication No. WO 91/17271; Winter et al. International Publication WO 92/20791; Markland et al. International Publication No. WO 92/15679; Breitling et al. International Publication WO 93/01288; McCafferty et al. International Publication No. WO 92/01047; Garrard et al. International Publication No. WO 92/09690; Ladner et al. International Publication No. WO 90/02809; Fuchs et al. (1991) Bio/Technology 9:1370-1372; Hay et al. (1992) Hum Antibod Hybridomas 3:81-85; Huse et al. (1989) Science 246:1275-1281; Griffths et al. (1993) EMBO J 12:725-734; Hawkins et al. (1992) J Mol Biol 226:889-896; Clackson et al. (1991) Nature 352:624-628; Gram et al. (1992) PNAS 89:3576-3580; Garrad et al. (1991) Bio/Technology 9:1373-1377; Hoogenboom et al. (1991) Nuc Acid Res 19:4133-4137; and Barbas et al. (1991) PNAS 88:7978-7982, the contents of all of which are incorporated by reference herein).

[0894] In one embodiment, the antibody is a fully human antibody (e.g., an antibody made in a mouse which has been genetically engineered to produce an antibody from a human immunoglobulin sequence), or a non-human antibody, e.g., a rodent (mouse or rat), goat, primate (e.g., monkey), camel antibody. Preferably, the non-human antibody is a rodent (mouse or rat antibody). Methods of producing rodent antibodies are known in the art.

[0895] Human monoclonal antibodies can be generated using transgenic mice carrying the human immunoglobulin genes rather than the mouse system. Splenocytes from these transgenic mice immunized with the antigen of interest are used to produce hybridomas that secrete human mAbs with specific affinities for epitopes from a human protein (see, e.g., Wood et al. International Application WO 91/00906, Kucherlapati et al. PCT publication WO 91/10741; Lonberg et al. International Application WO 92/03918; Kay et al. International Application 92/03917; Lonberg, N. et al. 1994 Nature 368:856-859; Green, L. L. et al. 1994 Nature Genet. 7:13-21; Morrison, S. L. et al. 1994 Proc. Natl. Acad. Sci. USA 81:6851-6855; Bruggeman et al. 1993 Year Immunol 7:33-40; Tuaillon et al. 1993 PNAS 90:3720-3724; Bruggeman et al. 1991 Eur J Immnol 21:1323-1326).

[0896] An antibody molecule can be one in which the variable region, or a portion thereof, e.g., the CDRs, are generated in a non-human organism, e.g., a rat or mouse. Chimeric, CDR-grafted, and humanized antibodies are within the invention. Antibody molecules generated in a non-human organism, e.g., a rat or mouse, and then modified, e.g., in the variable framework or constant region, to decrease antigenicity in a human are within the invention.

[0897] An “effectively human” protein is a protein that does substantially not evoke a neutralizing antibody response, e.g., the human anti-murine antibody (HAMA) response. HAMA can be problematic in a number of circumstances, e.g., if the antibody molecule is administered repeatedly, e.g., in treatment of a chronic or recurrent disease condition. A HAMA response can make repeated antibody administration potentially ineffective because of an increased antibody clearance from the serum (see, e.g., Saleh et al., Cancer Immunol. Immunother., 32:180-190 (1990)) and also because of potential allergic reactions (see, e.g., LoBuglio et al., Hybridoma, 5:5117-5123 (1986)).

[0898] Chimeric antibodies can be produced by recombinant DNA techniques known in the art (see Robinson et al., International Patent Publication PCT/US86/02269; Akira, et al., European Patent Application 184,187; Taniguchi, M., European Patent Application 171,496; Morrison et al., European Patent Application 173,494; Neuberger et al., International Application WO 86/01533; Cabilly et al. U .S. Pat. No. 4,816,567; Cabilly et al., European Patent Application 125,023; Better et al. (1988 Science 240:1041-1043); Liu et al. (1987) PNAS 84:3439-3443; Liu et al., 1987, J. Immunol. 139:3521-3526; Sun et al. (1987) PNAS 84:214-218; Nishimura et al., 1987, Canc. Res. 47:999-1005; Wood et al. (1985) Nature 314:446-449; and Shaw et al., 1988, J. Natl Cancer Inst. 80:1553-1559).

[0899] A humanized or CDR-grafted antibody will have at least one or two but generally all three recipient CDRs (of heavy and or light immuoglobulin chains) replaced with a donor CDR. The antibody may be replaced with at least a portion of a non-human CDR or only some of the CDRs may be replaced with non-human CDRs. It is only necessary to replace the number of CDRs required for binding to the antigen. Preferably, the donor will be a rodent antibody, e.g., a rat or mouse antibody, and the recipient will be a human framework or a human consensus framework. Typically, the immunoglobulin providing the CDRs is called the “donor” and the immunoglobulin providing the framework is called the “acceptor.” In one embodiment, the donor immunoglobulin is a non-human (e.g., rodent). The acceptor framework is a naturally-occurring (e.g., a human) framework or a consensus framework, or a sequence about 85% or higher, preferably 90%, 95%, 99% or higher identical thereto.

[0900] As used herein, the term “consensus sequence” refers to the sequence formed from the most frequently occurring amino acids (or nucleotides) in a family of related sequences (See e.g., Winnaker, From Genes to Clones (Verlagsgesellschaft, Weinheim, Germany 1987). In a family of proteins, each position in the consensus sequence is occupied by the amino acid occurring most frequently at that position in the family. If two amino acids occur equally frequently, either can be included in the consensus sequence. A “consensus framework” refers to the framework region in the consensus immunoglobulin sequence.

[0901] An antibody molecule can be humanized by methods known in the art (see e.g., Morrison, S. L., 1985, Science 229:1202-1207, by Oi et al., 1986, BioTechniques 4:214, and by Queen et al. U.S. Pat. Nos. 5,585,089, 5,693,761 and 5,693,762, the contents of all of which are hereby incorporated by reference).

[0902] Humanized or CDR-grafted antibody molecules can be produced by CDR-grafting or CDR substitution, wherein one, two, or all CDRs of an immunoglobulin chain can be replaced. See e.g., U .S. Pat. No. 5,225,539; Jones et al. 1986 Nature 321:552-525; Verhoeyan et al. 1988 Science 239:1534; Beidler et al. 1988 J. Immunol. 141:4053-4060; Winter U.S. Pat. No. 5,225,539, the contents of all of which are hereby expressly incorporated by reference. Winter describes a CDR-grafting method which may be used to prepare the humanized antibodies of the present invention (UK Patent Application GB 2188638A, filed on Mar. 26, 1987; Winter U.S. Pat. No. 5,225,539), the contents of which is expressly incorporated by reference.

[0903] Also within the scope of the invention are humanized antibody molecules in which specific amino acids have been substituted, deleted or added. Criteria for selecting amino acids from the donor are described in U.S. Pat. No. 5,585,089, e.g., columns 12-16 of U.S. Pat. No. 5,585,089, e.g., columns 12-16 of U.S. Pat. No. 5,585,089, the contents of which are hereby incorporated by reference. Other techniques for humanizing antibodies are described in Padlan et al. EP 519596 A1, published on Dec. 23, 1992.

[0904] The antibody molecule can be a single chain antibody. A single-chain antibody (scFv) may be engineered (see, for example, Colcher, D. et al. (1999) Ann N Y Acad Sci 880:263-80; and Reiter, Y. (1996) Clin Cancer Res 2:245-52). The single chain antibody can be dimerized or multimerized to generate multivalent antibodies having specificities for different epitopes of the same target protein.

[0905] In yet other embodiments, the antibody molecule has a heavy chain constant region chosen from, e.g., the heavy chain constant regions of IgG1, IgG2, IgG3, IgG4, IgM, IgA1, IgA2, IgD, and IgE; particularly, chosen from, e.g., the (e.g., human) heavy chain constant regions of IgG1, IgG2, IgG3, and IgG4. In another embodiment, the antibody molecule has a light chain constant region chosen from, e.g., the (e.g., human) light chain constant regions of kappa or lambda. The constant region can be altered, e.g., mutated, to modify the properties of the antibody (e.g., to increase or decrease one or more of: Fc receptor binding, antibody glycosylation, the number of cysteine residues, effector cell function, and/or complement function). In one embodiment the antibody has: effector function; and can fix complement. In other embodiments the antibody does not; recruit effector cells; or fix complement. In another embodiment, the antibody has reduced or no ability to bind an Fc receptor. For example, it is a isotype or subtype, fragment or other mutant, which does not support binding to an Fc receptor, e.g., it has a mutagenized or deleted Fc receptor binding region.

[0906] Methods for altering an antibody constant region are known in the art. Antibodies with altered function, e.g. altered affinity for an effector ligand, such as FcR on a cell, or the Cl component of complement can be produced by replacing at least one amino acid residue in the constant portion of the antibody with a different residue (see e.g., EP 388,151 A1, U.S. Pat. Nos. 5,624,821 and 5,648,260, the contents of all of which are hereby incorporated by reference). Similar type of alterations could be described which if applied to the murine, or other species immunoglobulin would reduce or eliminate these functions.

[0907] An antibody molecule can be derivatized or linked to another functional molecule (e.g., another peptide or protein). As used herein, a “derivatized” antibody molecule is one that has been modified. Methods of derivatization include but are not limited to the addition of a fluorescent moiety, a radionucleotide, a toxin, an enzyme or an affinity ligand such as biotin. Accordingly, the antibody molecules of the invention are intended to include derivatized and otherwise modified forms of the antibodies described herein, including immunoadhesion molecules. For example, an antibody molecule can be functionally linked (by chemical coupling, genetic fusion, noncovalent association or otherwise) to one or more other molecular entities, such as another antibody (e.g., a bispecific antibody or a diabody), a detectable agent, a cytotoxic agent, a pharmaceutical agent, and/or a protein or peptide that can mediate association of the antibody or antibody portion with another molecule (such as a streptavidin core region or a polyhistidine tag).

[0908] One type of derivatized antibody molecule is produced by crosslinking two or more antibodies (of the same type or of different types, e.g., to create bispecific antibodies). Suitable crosslinkers include those that are heterobifunctional, having two distinctly reactive groups separated by an appropriate spacer (e.g., m-maleimidobenzoyl-N-hydroxysuccinimide ester) or homobifunctional (e.g., disuccinimidyl suberate). Such linkers are available from Pierce Chemical Company, Rockford, Ill.

### Multispecific or Multifunctional Antibody Molecules

[0909] Exemplary structures of multispecific and multifunctional molecules defined herein are described throughout. Exemplary structures are further described in: Weidle U et al. (2013) The Intriguing Options of Multispecific Antibody Formats for Treatment of Cancer. Cancer Genomics & Proteomics 10: 1-18 (2013); and Spiess C et al. (2015) Alternative molecular formats and therapeutic applications for bispecific antibodies. Molecular Immunology 67: 95-106; the full contents of each of which is incorporated by reference herein).

[0910] In embodiments, multispecific antibody molecules can comprise more than one antigen-binding site, where different sites are specific for different antigens. In embodiments, multispecific antibody molecules can bind more than one (e.g., two or more) epitopes on the same antigen. In embodiments, multispecific antibody molecules comprise an antigen-binding site specific for a target cell (e.g., an infectious agent) and a different antigen-binding site specific for an immune effector cell. In one embodiment, the multispecific antibody molecule is a bispecific antibody molecule. Bispecific antibody molecules can be classified into five different structural groups: (i) bispecific immunoglobulin G (BsIgG); (ii) IgG appended with an additional antigen-binding moiety; (iii) bispecific antibody fragments; (iv) bispecific fusion proteins; and (v) bispecific antibody conjugates.

[0911] BsIgG is a format that is monovalent for each antigen. Exemplary BsIgG formats include but are not limited to crossMab, DAF (two-in-one), DAF (four-in-one), DutaMab, DT-IgG, knobs-in-holes common LC, knobs-in-holes assembly, charge pair, Fab-arm exchange, SEEDbody, triomab, LUZ-Y, Fcab, κλ-body, orthogonal Fab. See Spiess et al. Mol. Immunol. 67(2015):95-106. Exemplary BsIgGs include catumaxomab (Fresenius Biotech, Trion Pharma, Neopharm), which contains an anti-CD3 arm and an anti-EpCAM arm; and ertumaxomab (Neovii Biotech, Fresenius Biotech), which targets CD3 and HER2. In some embodiments, BsIgG comprises heavy chains that are engineered for heterodimerization. For example, heavy chains can be engineered for heterodimerization using a “knobs-into-holes” strategy, a SEED platform, a common heavy chain (e.g., in κλ-bodies), and use of heterodimeric Fc regions. See Spiess et al. Mol. Immunol. 67(2015):95-106. Strategies that have been used to avoid heavy chain pairing of homodimers in BsIgG include knobs-in-holes, duobody, azymetric, charge pair, HA-TF, SEEDbody, and differential protein A affinity. See Id. BsIgG can be produced by separate expression of the component antibodies in different host cells and subsequent purification/assembly into a BsIgG. BsIgG can also be produced by expression of the component antibodies in a single host cell. BsIgG can be purified using affinity chromatography, e.g., using protein A and sequential pH elution.

[0912] IgG appended with an additional antigen-binding moiety is another format of bispecific antibody molecules. For example, monospecific IgG can be engineered to have bispecificity by appending an additional antigen-binding unit onto the monospecific IgG, e.g., at the N- or C-terminus of either the heavy or light chain. Exemplary additional antigen-binding units include single domain antibodies (e.g., variable heavy chain or variable light chain), engineered protein scaffolds, and paired antibody variable domains (e.g., single chain variable fragments or variable fragments). See Id. Examples of appended IgG formats include dual variable domain IgG (DVD-Ig), IgG(H)-scFv, scFv-(H)IgG, IgG(L)-scFv, scFv-(L)IgG, IgG(L,H)-Fv, IgG(H)-V, V(H)-IgG, IgG(L)-V, V(L)-IgG, KIH IgG-scFab, 2scFv-IgG, IgG-2scFv, scFv4-Ig, zybody, and DVI-IgG (four-in-one). See Spiess et al. Mol. Immunol. 67(2015):95-106. An example of an IgG-scFv is MM-141 (Merrimack Pharmaceuticals), which binds IGF-1R and HER3. Examples of DVD-Ig include ABT-981 (AbbVie), which binds IL-1α and IL-1β; and ABT-122 (AbbVie), which binds TNF and IL-17A.

[0913] Bispecific antibody fragments (BsAb) are a format of bispecific antibody molecules that lack some or all of the antibody constant domains. For example, some BsAb lack an Fc region. In embodiments, bispecific antibody fragments include heavy and light chain regions that are connected by a peptide linker that permits efficient expression of the BsAb in a single host cell. Exemplary bispecific antibody fragments include but are not limited to nanobody, nanobody-HAS, BiTE, Diabody, DART, TandAb, scDiabody, scDiabody-CH3, Diabody-CH3, triple body, miniantibody, minibody, TriBi minibody, scFv-CH3 KIH, Fab-scFv, scFv-CH-CL-scFv, F(ab′)₂, F(ab')2-scFv2, scFv-KIH, Fab-scFv-Fc, tetravalent HCAb, scDiabody-Fc, Diabody-Fc, tandem scFv-Fc, and intrabody. See Id. For example, the BiTE format comprises tandem scFvs, where the component scFvs bind to CD3 on T cells and an antigen of an infectious agent or portion thereof.

[0914] Bispecific fusion proteins include antibody fragments linked to other proteins, e.g., to add additional specificity and/or functionality. An example of a bispecific fusion protein is an immTAC, which comprises an anti-CD3 scFv linked to an affinity-matured T-cell receptor that recognizes HLA-presented peptides. In embodiments, the dock-and-lock (DNL) method can be used to generate bispecific antibody molecules with higher valency. Also, fusions to albumin binding proteins or human serum albumin can be extend the serum half-life of antibody fragments. See Id.

[0915] In embodiments, chemical conjugation, e.g., chemical conjugation of antibodies and/or antibody fragments, can be used to create BsAb molecules. See Id. An exemplary bispecific antibody conjugate includes the CovX-body format, in which a low molecular weight drug is conjugated site-specifically to a single reactive lysine in each Fab arm or an antibody or fragment thereof. In embodiments, the conjugation improves the serum half-life of the low molecular weight drug. An exemplary CovX-body is CVX-241 (NCT01004822), which comprises an antibody conjugated to two short peptides inhibiting either VEGF or Ang2. See Id.

[0916] The antibody molecules can be produced by recombinant expression, e.g., of at least one or more component, in a host system. Exemplary host systems include eukaryotic cells (e.g., mammalian cells, e.g., CHO cells, or insect cells, e.g., SF9 or S2 cells) and prokaryotic cells (e.g., E. coli). Bispecific antibody molecules can be produced by separate expression of the components in different host cells and subsequent purification/assembly. Alternatively, the antibody molecules can be produced by expression of the components in a single host cell. Purification of bispecific antibody molecules can be performed by various methods such as affinity chromatography, e.g., using protein A and sequential pH elution. In other embodiments, affinity tags can be used for purification, e.g., histidine-containing tag, myc tag, or streptavidin tag.

### Infectious Disease Antigen Moiety

[0917] In an aspect, provided herein is a multispecific molecule, e.g., a bispecific molecule, comprising:
[0918] (i) a first moiety (e.g., a first immune cell engager) comprising the anti-TCRβV antibody molecule described herein; and
[0919] (ii) a second moiety comprising one or more of: an infectious disease-targeting moiety; a second immune cell engager; a cytokine molecule or a stromal modifying moiety.

[0920] In some embodiments of any of the compositions or methods disclosed herein, the infectious disease -targeting moiety is an antigen, e.g., an infectious disease antigen, e.g., as described herein.

[0921] In some embodiments of any of the compositions or methods disclosed herein, the infectious disease-targeting moiety, e.g., antigen from an infectious agent, is chosen from: EBNA3 (e.g., 339-347), EBNA1 (e.g., 407-417), BZLF1 (e.g., 52-64), matrix protein (e.g., influenza virus matrix protein, e.g., 58-66), HIV Gag (e.g., HIV Gag p17, e.g., 77-85), HIV Env, HIV p24 capsid, SIV Tat (e.g., 28-35), SIV Gag (e.g., 181-189), or HCMV pp65 (e.g., 495-503).

### CDR-Grafted Scaffolds

[0922] In embodiments, the antibody molecule is a CDR-grafted scaffold domain. In embodiments, the scaffold domain is based on a fibronectin domain, e.g., fibronectin type III domain. The overall fold of the fibronectin type III (Fn3) domain is closely related to that of the smallest functional antibody fragment, the variable domain of the antibody heavy chain. There are three loops at the end of Fn3; the positions of BC, DE and FG loops approximately correspond to those of CDR1, 2 and 3 of the VH domain of an antibody. Fn3 does not have disulfide bonds; and therefore Fn3 is stable under reducing conditions, unlike antibodies and their fragments (see, e.g., WO 98/56915; WO 01/64942; WO 00/34784). An Fn3 domain can be modified (e.g., using CDRs or hypervariable loops described herein) or varied, e.g., to select domains that bind to an antigen/marker/cell described herein.

[0923] In embodiments, a scaffold domain, e.g., a folded domain, is based on an antibody, e.g., a “minibody” scaffold created by deleting three beta strands from a heavy chain variable domain of a monoclonal antibody (see, e.g., Tramontano et al., 1994, J Mol. Recognit. 7:9; and Martin et al., 1994, EMBO J. 13:5303-5309). The “minibody” can be used to present two hypervariable loops. In embodiments, the scaffold domain is a V-like domain (see, e.g., Coia et al. WO 99/45110) or a domain derived from tendamistatin, which is a 74 residue, six-strand beta sheet sandwich held together by two disulfide bonds (see, e.g., McConnell and Hoess, 1995, J Mol. Biol. 250:460). For example, the loops of tendamistatin can be modified (e.g., using CDRs or hypervariable loops) or varied, e.g., to select domains that bind to a marker/antigen/cell described herein. Another exemplary scaffold domain is a beta-sandwich structure derived from the extracellular domain of CTLA-4 (see, e.g., WO 00/60070).

[0924] Other exemplary scaffold domains include but are not limited to T-cell receptors; MHC proteins; extracellular domains (e.g., fibronectin Type III repeats, EGF repeats); protease inhibitors (e.g., Kunitz domains, ecotin, BPTI, and so forth); TPR repeats; trifoil structures; zinc finger domains; DNA-binding proteins; particularly monomeric DNA binding proteins; RNA binding proteins; enzymes, e.g., proteases (particularly inactivated proteases), RNase; chaperones, e.g., thioredoxin, and heat shock proteins; and intracellular signaling domains (such as SH2 and SH3 domains). See, e.g., US 20040009530 and U.S. Pat. No. 7,501,121, incorporated herein by reference.

[0925] In embodiments, a scaffold domain is evaluated and chosen, e.g., by one or more of the following criteria: (1) amino acid sequence, (2) sequences of several homologous domains, (3) 3-dimensional structure, and/or (4) stability data over a range of pH, temperature, salinity, organic solvent, oxidant concentration. In embodiments, the scaffold domain is a small, stable protein domain, e.g., a protein of less than 100, 70, 50, 40 or 30 amino acids. The domain may include one or more disulfide bonds or may chelate a metal, e.g., zinc.

### Antibody-Based Fusions

[0926] A variety of formats can be generated which contain additional binding entities attached to the N or C terminus of antibodies. These fusions with single chain or disulfide stabilized Fvs or Fabs result in the generation of tetravalent molecules with bivalent binding specificity for each antigen. Combinations of scFvs and scFabs with IgGs enable the production of molecules which can recognize three or more different antigens.

### Antibody-Fab Fusion

[0927] Antibody-Fab fusions are bispecific antibodies comprising a traditional antibody to a first target and a Fab to a second target fused to the C terminus of the antibody heavy chain. Commonly the antibody and the Fab will have a common light chain. Antibody fusions can be produced by (1) engineering the DNA sequence of the target fusion, and (2) transfecting the target DNA into a suitable host cell to express the fusion protein. It seems like the antibody-scFv fusion may be linked by a (Gly)-Ser linker between the C-terminus of the CH3 domain and the N-terminus of the scFv, as described by Coloma, J. et al. (1997) Nature Biotech 15:159.

### Antibody-scFv Fusion

[0928] Antibody-scFv Fusions are bispecific antibodies comprising a traditional antibody and a scFv of unique specificity fused to the C terminus of the antibody heavy chain. The scFv can be fused to the C terminus through the Heavy Chain of the scFv either directly or through a linker peptide. Antibody fusions can be produced by (1) engineering the DNA sequence of the target fusion, and (2) transfecting the target DNA into a suitable host cell to express the fusion protein. It seems like the antibody-scFv fusion may be linked by a (Gly)-Ser linker between the C-terminus of the CH3 domain and the N-terminus of the scFv, as described by Coloma, J. et al. (1997) Nature Biotech 15:159.

### Variable Domain Immunoglobulin DVD

[0929] A related format is the dual variable domain immunoglobulin (DVD), which are composed of VH and VL domains of a second specificity place upon the N termini of the V domains by shorter linker sequences.

[0930] Other exemplary multispecific antibody formats include, e.g., those described in the following US20160114057A1, US20130243775A1, US20140051833, US20130022601, US20150017187A1, US20120201746A1, US20150133638A1, US20130266568A1, US20160145340A1, WO2015127158A1, US20150203591A1, US20140322221A1, US20130303396A1, US20110293613, US20130017200A1, US20160102135A1, WO2015197598A2, WO2015197582A1, US9359437, US20150018529, WO2016115274A1, WO2016087416A1, US20080069820A1, US9145588B, US7919257, and US20150232560A1. Exemplary multispecific molecules utilizing a full antibody-Fab/scFab format include those described in the following, U.S. Pat. No. 9,382,323B2, US20140072581A1, US20140308285A1, US20130165638A1, US20130267686A1, US20140377269A1, US7741446B2, and WO1995009917A1. Exemplary multispecific molecules utilizing a domain exchange format include those described in the following, US20150315296A1, WO2016087650A1, US20160075785A1, WO2016016299A1, US20160130347A1, US20150166670, U.S. Pat. No. 8,703,132B2, US20100316645, U.S. Pat. No. 8,227,577B2, US20130078249.

### Fc-Containing Entities (Mini-Antibodies)

[0931] Fc-containing entities, also known as mini-antibodies, can be generated by fusing scFv to the C-termini of constant heavy region domain 3 (CH3-scFv) and/or to the hinge region (scFv-hinge-Fc) of an antibody with a different specificity. Trivalent entities can also be made which have disulfide stabilized variable domains (without peptide linker) fused to the C-terminus of CH3 domains of IgGs.

### Fc-Containing Multispecific Molecules

[0932] In some embodiments, the multispecific molecules disclosed herein includes an immunoglobulin constant region (e.g., an Fc region). Exemplary Fc regions can be chosen from the heavy chain constant regions of IgG1, IgG2, IgG3 or IgG4; more particularly, the heavy chain constant region of human IgG1, IgG2, IgG3, or IgG4.

[0933] In some embodiments, the immunoglobulin chain constant region (e.g., the Fc region) is altered, e.g., mutated, to increase or decrease one or more of: Fc receptor binding, antibody glycosylation, the number of cysteine residues, effector cell function, or complement function.

[0934] In other embodiments, an interface of a first and second immunoglobulin chain constant regions (e.g., a first and a second Fc region) is altered, e.g., mutated, to increase or decrease dimerization, e.g., relative to a non-engineered interface, e.g., a naturally-occurring interface. For example, dimerization of the immunoglobulin chain constant region (e.g., the Fc region) can be enhanced by providing an Fc interface of a first and a second Fc region with one or more of: a paired protuberance-cavity (“knob-in-a hole”), an electrostatic interaction, or a strand-exchange, such that a greater ratio of heteromultimer to homomultimer forms, e.g., relative to a non-engineered interface.

[0935] In some embodiments, the multispecific molecules include a paired amino acid substitution at a position chosen from one or more of 347, 349, 350, 351, 366, 368, 370, 392, 394, 395, 397, 398, 399, 405, 407, or 409, e.g., of the Fc region of human IgG1 For example, the immunoglobulin chain constant region (e.g., Fc region) can include a paired an amino acid substitution chosen from: T366S, L368A, or Y407V (e.g., corresponding to a cavity or hole), and T366W (e.g., corresponding to a protuberance or knob).

[0936] In other embodiments, the multifunctional molecule includes a half-life extender, e.g., a human serum albumin or an antibody molecule to human serum albumin.

### Heterodimerized Antibody Molecules & Methods of Making

[0937] Various methods of producing multispecific antibodies have been disclosed to address the problem of incorrect heavy chain pairing. Exemplary methods are described below. Exemplary multispecific antibody formats and methods of making said multispecific antibodies are also disclosed in e.g., Speiss et al. Molecular Immunology 67 (2015) 95-106; and Klein et al mAbs 4:6, 653-663; November/December 2012; the entire contents of each of which are incorporated by reference herein.

[0938] Heterodimerized bispecific antibodies are based on the natural IgG structure, wherein the two binding arms recognize different antigens. IgG derived formats that enable defined monovalent (and simultaneous) antigen binding are generated by forced heavy chain heterodimerization, combined with technologies that minimize light chain mispairing (e.g., common light chain). Forced heavy chain heterodimerization can be obtained using, e.g., knob-in-hole OR strand exchange engineered domains (SEED).

[0939] Knob-in-Hole

[0940] Knob-in-Hole as described in U.S. Pat. Nos. 5,731,116, 7,476,724 and Ridgway, J. et al. (1996) Prot. Engineering 9(7): 617-621, broadly involves: (1) mutating the CH3 domain of one or both antibodies to promote heterodimerization; and (2) combining the mutated antibodies under conditions that promote heterodimerization. “Knobs” or “protuberances” are typically created by replacing a small amino acid in a parental antibody with a larger amino acid (e.g., T366Y or T366W); “Holes” or “cavities” are created by replacing a larger residue in a parental antibody with a smaller amino acid (e.g., Y407T, T366S, L368A and/or Y407V).

[0941] For bispecific antibodies including an Fc domain, introduction of specific mutations into the constant region of the heavy chains to promote the correct heterodimerization of the Fc portion can be utilized. Several such techniques are reviewed in Klein et al. (mAbs (2012) 4:6, 1-11), the contents of which are incorporated herein by reference in their entirety. These techniques include the “knobs-into-holes” (KiH) approach which involves the introduction of a bulky residue into one of the CH3 domains of one of the antibody heavy chains. This bulky residue fits into a complementary “hole” in the other CH3 domain of the paired heavy chain so as to promote correct pairing of heavy chains (see e.g., U.S. Pat. No. 7,642,228).

[0942] Exemplary KiH mutations include S354C, T366W in the “knob” heavy chain and Y349C, T366S, L368A, Y407V in the “hole” heavy chain. Other exemplary KiH mutations are provided in Table 11, with additional optional stabilizing Fc cysteine mutations.

TABLE 11
Exemplary Fc KiH mutations and optional Cysteine mutations

| | Knob | Hole |
|---|---|---|
| Position | Mutation | Mutation |
| 1366 | 1366W | 1366S |
| L368 | — | L368A |
| Y407 | — | Y407V |

Additional Cysteine Mutations to form a stabilizing disulfide bridge

| Position | Knob CH3 | Hole CH3 |
|---|---|---|
| S354 | S354C | — |
| Y349 | — | Y349C |

[0943] Other Fc mutations are provided by Igawa and Tsunoda who identified 3 negatively charged residues in the CH3 domain of one chain that pair with three positively charged residues in the CH3 domain of the other chain. These specific charged residue pairs are: E356-K439, E357-K370, D399-K409 and vice versa. By introducing at least two of the following three mutations in chain A: E356K, E357K and D399K, as well as K370E, K409D, K439E in chain B, alone or in combination with newly identified disulfide bridges, they were able to favor very efficient heterodimerization while suppressing homodimerization at the same time (Martens T et al. A novel one-armed antic- Met antibody inhibits glioblastoma growth in vivo. Clin Cancer Res 2006; 12:6144-52; PMID:17062691). Xencor defined 41 variant pairs based on combining structural calculations and sequence information that were subsequently screened for maximal heterodimerization, defining the combination of S364H, F405A (HA) on chain A and Y349T, T394F on chain B (TF) (Moore GL et al. A novel bispecific antibody format enables simultaneous bivalent and monovalent co-engagement of distinct target antigens. MAbs 2011; 3:546-57; PMID: 22123055).

[0944] Other exemplary Fc mutations to promote heterodimerization of multispecific antibodies include those described in the following references, the contents of each of which is incorporated by reference herein, WO2016071377A1, US20140079689A1, US20160194389A1, US20160257763, WO2016071376A2, WO2015107026A1, WO2015107025A1, WO2015107015A1, US20150353636A1, US20140199294A1, U.S. Pat. No. 7,750,128B2, US20160229915A1, US20150344570A1, U.S. Pat. No. 8,003,774A1, US20150337049A1, US20150175707A1, US20140242075A1, US20130195849A1, US20120149876A1, US20140200331A1, U.S. Pat. Nos. 9,309,311B2, 8,586,713, US20140037621A1, US20130178605A1, US20140363426A1, US20140051835A1 and US20110054151A1.

[0945] Stabilizing cysteine mutations have also been used in combination with KiH and other Fc heterodimerization promoting variants, see e.g., U.S. Pat. No. 7,183,076. Other exemplary cysteine modifications include, e.g., those disclosed in US20140348839A1, U.S. Pat. No. 7,855,275B2, and US9000130B2.

[0946] Strand Exchange Engineered Domains (SEED)

[0947] Heterodimeric Fc platform that support the design of bispecific and asymmetric fusion proteins by devising strand-exchange engineered domain (SEED) C(H)3 heterodimers are known. These derivatives of human IgG and IgA C(H)3 domains create complementary human SEED C(H)3 heterodimers that are composed of alternating segments of human IgA and IgG C(H)3 sequences. The resulting pair of SEED C(H)3 domains preferentially associates to form heterodimers when expressed in mammalian cells. SEEDbody (Sb) fusion proteins consist of [IgG1 hinge]-C(H)2-[SEED C(H)3], that may be genetically linked to one or more fusion partners (see e.g., Davis JH et al. SEEDbodies: fusion proteins based on strand exchange engineered domain (SEED) CH3 heterodimers in an Fc analogue platform for asymmetric binders or immunofusions and bispecific antibodies. Protein Eng Des Sel 2010; 23:195-202; PMID:20299542 and US8871912. The contents of each of which are incorporated by reference herein).

[0948] Duobody

[0949] “Duobody” technology to produce bispecific antibodies with correct heavy chain pairing are known. The DuoBody technology involves three basic steps to generate stable bispecific human IgGlantibodies in a post-production exchange reaction. In a first step, two IgGls, each containing single matched mutations in the third constant (CH3) domain, are produced separately using standard mammalian recombinant cell lines. Subsequently, these IgG1 antibodies are purified according to standard processes for recovery and purification. After production and purification (post-production), the two antibodies are recombined under tailored laboratory conditions resulting in a bispecific antibody product with a very high yield (typically >95%) (see e.g., Labrijn et al, PNAS 2013; 110(13):5145-5150 and Labrijn et al. Nature Protocols 2014; 9(10):2450-63, the contents of each of which are incorporated by reference herein).

[0950] Electrostatic Interactions

[0951] Methods of making multispecific antibodies using CH3 amino acid changes with charged amino acids such that homodimer formation is electrostatically unfavorable are disclosed. EP1870459 and WO 2009089004 describe other strategies for favoring heterodimer formation upon co-expression of different antibody domains in a host cell. In these methods, one or more residues that make up the heavy chain constant domain 3 (CH3), CH3-CH3 interfaces in both CH3 domains are replaced with a charged amino acid such that homodimer formation is electrostatically unfavorable and heterodimerization is electrostatically favorable. Additional methods of making multispecific molecules using electrostatic interactions are described in the following references, the contents of each of which is incorporated by reference herein, include US20100015133, US8592562B2, US9200060B2, US20140154254A1, and U.S. Pat. No. 9,358,286A1.

[0952] Common Light Chain

[0953] Light chain mispairing needs to be avoided to generate homogenous preparations of bispecific IgGs. One way to achieve this is through the use of the common light chain principle, i.e. combining two binders that share one light chain but still have separate specificities. An exemplary method of enhancing the formation of a desired bispecific antibody from a mixture of monomers is by providing a common variable light chain to interact with each of the heteromeric variable heavy chain regions of the bispecific antibody. Compositions and methods of producing bispecific antibodies with a common light chain as disclosed in, e.g., US7183076B2, US20110177073A1, EP2847231A1, WO2016079081A1, and EP3055329A1, the contents of each of which is incorporated by reference herein.

[0954] CrossMab

[0955] Another option to reduce light chain mispairing is the CrossMab technology which avoids non-specific L chain mispairing by exchanging CH1 and CL domains in the Fab of one half of the bispecific antibody. Such crossover variants retain binding specificity and affinity, but make the two arms so different that L chain mispairing is prevented. The CrossMab technology (as reviewed in Klein et al. Supra) involves domain swapping between heavy and light chains so as to promote the formation of the correct pairings. Briefly, to construct a bispecific IgG-like CrossMab antibody that could bind to two antigens by using two distinct light chain-heavy chain pairs, a two-step modification process is applied. First, a dimerization interface is engineered into the C-terminus of each heavy chain using a heterodimerization approach, e.g., Knob-into-hole (KiH) technology, to ensure that only a heterodimer of two distinct heavy chains from one antibody (e.g., Antibody A) and a second antibody (e.g., Antibody B) is efficiently formed. Next, the constant heavy 1 (CH1) and constant light (CL) domains of one antibody are exchanged (Antibody A), keeping the variable heavy (VH) and variable light (VL) domains consistent. The exchange of the CH1 and CL domains ensured that the modified antibody (Antibody A) light chain would only efficiently dimerize with the modified antibody (antibody A) heavy chain, while the unmodified antibody (Antibody B) light chain would only efficiently dimerize with the unmodified antibody (Antibody B) heavy chain; and thus only the desired bispecific CrossMab would be efficiently formed (see e.g., Cain, C. SciBX 4(28); doi:10.1038/scibx.2011.783, the contents of which are incorporated by reference herein).

[0956] Common Heavy Chain

[0957] An exemplary method of enhancing the formation of a desired bispecific antibody from a mixture of monomers is by providing a common variable heavy chain to interact with each of the heteromeric variable light chain regions of the bispecific antibody. Compositions and methods of producing bispecific antibodies with a common heavy chain are disclosed in, e.g., US20120184716, US20130317200, and US20160264685A1, the contents of each of which is incorporated by reference herein.

[0958] Amino Acid Modifications

[0959] Alternative compositions and methods of producing multispecific antibodies with correct light chain pairing include various amino acid modifications. For example, Zymeworks describes heterodimers with one or more amino acid modifications in the CH1 and/or CL domains, one or more amino acid modifications in the VH and/or VL domains, or a combination thereof, which are part of the interface between the light chain and heavy chain and create preferential pairing between each heavy chain and a desired light chain such that when the two heavy chains and two light chains of the heterodimer pair are co-expressed in a cell, the heavy chain of the first heterodimer preferentially pairs with one of the light chains rather than the other (see e.g., WO2015181805). Other exemplary methods are described in WO2016026943 (Argen-X), US20150211001, US20140072581A1, US20160039947A1, and US20150368352.

[0960] Lambda/Kappa Formats

[0961] Multispecific molecules (e.g., multispecific antibody molecules) that include the lambda light chain polypeptide and a kappa light chain polypeptides, can be used to allow for heterodimerization. Methods for generating bispecific antibody molecules comprising the lambda light chain polypeptide and a kappa light chain polypeptides are disclosed in PCT/US17/53053 filed on Sep. 22, 2017 and designated publication number WO 2018/057955, incorporated herein by reference in its entirety.

[0962] In embodiments, the multispecific molecule includes a multispecific antibody molecule, e.g., an antibody molecule comprising two binding specificities, e.g., a bispecific antibody molecule. The multispecific antibody molecule includes: a lambda light chain polypeptide 1 (LLCP1) specific for a first epitope; a heavy chain polypeptide 1 (HCP1) specific for the first epitope; a kappa light chain polypeptide 2 (KLCP2) specific for a second epitope; and a heavy chain polypeptide 2 (HCP2) specific for the second epitope.

[0963] “Lambda light chain polypeptide 1 (LLCP1)”, as that term is used herein, refers to a polypeptide comprising sufficient light chain (LC) sequence, such that when combined with a cognate heavy chain variable region, can mediate specific binding to its epitope and complex with an HCP1. In an embodiment it comprises all or a fragment of a CH1 region. In an embodiment, an LLCP1 comprises LC-CDR1, LC-CDR2, LC-CDR3, FR1, FR2, FR3, FR4, and CH1, or sufficient sequence therefrom to mediate specific binding of its epitope and complex with an HCP1. LLCP1, together with its HCP1, provide specificity for a first epitope (while KLCP2, together with its HCP2, provide specificity for a second epitope). As described elsewhere herein, LLCP1 has a higher affinity for HCP1 than for HCP2.

[0964] “Kappa light chain polypeptide 2 (KLCP2)”, as that term is used herein, refers to a polypeptide comprising sufficient light chain (LC) sequence, such that when combined with a cognate heavy chain variable region, can mediate specific binding to its epitope and complex with an HCP2. In an embodiments it comprises all or a fragment of a CH1 region. In an embodiment, a KLCP2 comprises LC-CDR1, LC-CDR2, LC-CDR3, FR1, FR2, FR3, FR4, and CH1, or sufficient sequence therefrom to mediate specific binding of its epitope and complex with an HCP2. KLCP2, together with its HCP2, provide specificity for a second epitope (while LLCP1, together with its HCP1, provide specificity for a first epitope).

[0965] “Heavy chain polypeptide 1 (HCP1)”, as that term is used herein, refers to a polypeptide comprising sufficient heavy chain (HC) sequence, e.g., HC variable region sequence, such that when combined with a cognate LLCP1, can mediate specific binding to its epitope and complex with an HCP1. In an embodiments it comprises all or a fragment of a CHlregion. In an embodiment, it comprises all or a fragment of a CH2 and/or CH3 region. In an embodiment an HCP1 comprises HC-CDR1, HC-CDR2, HC-CDR3, FR1, FR2, FR3, FR4, CH1, CH2, and CH3, or sufficient sequence therefrom to: (i) mediate specific binding of its epitope and complex with an LLCP1, (ii) to complex preferentially, as described herein to LLCP1 as opposed to KLCP2; and (iii) to complex preferentially, as described herein, to an HCP2, as opposed to another molecule of HCP1. HCP1, together with its LLCP1, provide specificity for a first epitope (while KLCP2, together with its HCP2, provide specificity for a second epitope).

[0966] “Heavy chain polypeptide 2 (HCP2)”, as that term is used herein, refers to a polypeptide comprising sufficient heavy chain (HC) sequence, e.g., HC variable region sequence, such that when combined with a cognate LLCP1, can mediate specific binding to its epitope and complex with an HCP1. In an embodiments it comprises all or a fragment of a CHlregion. In an embodiments it comprises all or a fragment of a CH2 and/or CH3 region. In an embodiment an HCP1 comprises HC-CDR1, HC-CDR2, HC-CDR3, FR1, FR2, FR3, FR4, CH1, CH2, and CH3, or sufficient sequence therefrom to: (i) mediate specific binding of its epitope and complex with an KLCP2, (ii) to complex preferentially, as described herein to KLCP2 as opposed to LLCP1; and (iii) to complex preferentially, as described herein, to an HCP1, as opposed to another molecule of HCP2. HCP2, together with its KLCP2, provide specificity for a second epitope (while LLCP1, together with its HCP1, provide specificity for a first epitope).

[0967] In some embodiments of the multispecific antibody molecule disclosed herein:
[0968] LLCP1 has a higher affinity for HCP1 than for HCP2; and/or
[0969] KLCP2 has a higher affinity for HCP2 than for HCP1.

[0970] In embodiments, the affinity of LLCP1 for HCP1 is sufficiently greater than its affinity for HCP2, such that under preselected conditions, e.g., in aqueous buffer, e.g., at pH 7, in saline, e.g., at pH 7, or under physiological conditions, at least 75, 80, 90, 95, 98, 99, 99.5, or 99.9% of the multispecific antibody molecule molecules have a LLCPlcomplexed, or interfaced with, a HCP .

[0971] In some embodiments of the multispecific antibody molecule disclosed herein: the HCP1 has a greater affinity for HCP2, than for a second molecule of HCP1; and/or the HCP2 has a greater affinity for HCP1, than for a second molecule of HCP2.

[0972] In embodiments, the affinity of HCP1 for HCP2 is sufficiently greater than its affinity for a second molecule of HCP1, such that under preselected conditions, e.g., in aqueous buffer, e.g., at pH 7, in saline, e.g., at pH 7, or under physiological conditions, at least 75%, 80, 90, 95, 98, 99 99.5 or 99.9% of the multispecific antibody molecule molecules have a HCPlcomplexed, or interfaced with, a HCP2.

[0973] In another aspect, disclosed herein is a method for making, or producing, a multispecific antibody molecule. The method includes:
[0974] (i) providing a first heavy chain polypeptide (e.g., a heavy chain polypeptide comprising one, two, three or all of a first heavy chain variable region (first VH), a first CH1, a first heavy chain constant region (e.g., a first CH2, a first CH3, or both));
[0975] (ii) providing a second heavy chain polypeptide (e.g., a heavy chain polypeptide comprising one, two, three or all of a second heavy chain variable region (second VH), a second CH1, a second heavy chain constant region (e.g., a second CH2, a second CH3, or both));
[0976] (iii) providing a lambda chain polypeptide (e.g., a lambda light variable region (VLX), a lambda light constant chain (VLX), or both) that preferentially associates with the first heavy chain polypeptide (e.g., the first VH); and
[0977] (iv) providing a kappa chain polypeptide (e.g., a lambda light variable region (VLK), a lambda light constant chain (VL⁻k), or both) that preferentially associates with the second heavy chain polypeptide (e.g., the second VH), under conditions where (i)-(iv) associate.

[0978] In embodiments, the first and second heavy chain polypeptides form an Fc interface that enhances heterodimerization.

[0979] In embodiments, (i)-(iv) (e.g., nucleic acid encoding (i)-(iv)) are introduced in a single cell, e.g., a single mammalian cell, e.g., a CHO cell. In embodiments, (i)-(iv) are expressed in the cell.

[0980] In embodiments, (i)-(iv) (e.g., nucleic acid encoding (i)-(iv)) are introduced in different cells, e.g., different mammalian cells, e.g., two or more CHO cell. In embodiments, (i)-(iv) are expressed in the cells.

[0981] In one embodiments, the method further comprises purifying a cell-expressed antibody molecule, e.g., using a lambda- and/or- kappa-specific purification, e.g., affinity chromatography.

[0982] In embodiments, the method further comprises evaluating the cell-expressed multispecific antibody molecule. For example, the purified cell-expressed multispecific antibody molecule can be analyzed by techniques known in the art, include mass spectrometry. In one embodiment, the purified cell-expressed antibody molecule is cleaved, e.g., digested with papain to yield the Fab moieties and evaluated using mass spectrometry.

[0983] In embodiments, the method produces correctly paired kappa/lambda multispecific, e.g., bispecific, antibody molecules in a high yield, e.g., at least 75%, 80, 90, 95, 98, 99 99.5 or 99.9%.

[0984] In other embodiments, the multispecific, e.g., a bispecific, antibody molecule that includes:
[0985] (i) a first heavy chain polypeptide (HCP1) (e.g., a heavy chain polypeptide comprising one, two, three or all of a first heavy chain variable region (first VH), a first CH1, a first heavy chain constant region (e.g., a first CH2, a first CH3, or both)), e.g., wherein the HCP1 binds to a first epitope;
[0986] (ii) a second heavy chain polypeptide (HCP2) (e.g., a heavy chain polypeptide comprising one, two, three or all of a second heavy chain variable region (second VH), a second CH1, a second heavy chain constant region (e.g., a second CH2, a second CH3, or both)), e.g., wherein the HCP2 binds to a second epitope;
[0987] (iii) a lambda light chain polypeptide (LLCP1) (e.g., a lambda light variable region (VL1), a lambda light constant chain (VL1), or both) that preferentially associates with the first heavy chain polypeptide (e.g., the first VH), e.g., wherein the LLCP1 binds to a first epitope; and
[0988] (iv) a kappa light chain polypeptide (KLCP2) (e.g., a lambda light variable region (VLk), a lambda light constant chain (VLk), or both) that preferentially associates with the second heavy chain polypeptide (e.g., the second VH), e.g., wherein the KLCP2 binds to a second epitope.

[0989] In embodiments, the first and second heavy chain polypeptides form an Fc interface that enhances heterodimerization. In embodiments, the multispecific antibody molecule has a first binding specificity that includes a hybrid VL1-CL1 heterodimerized to a first heavy chain variable region connected to the Fc constant, CH2-CH3 domain (having a knob modification) and a second binding specificity that includes a hybrid VLk-CLk heterodimerized to a second heavy chain variable region connected to the Fc constant, CH2-CH3 domain (having a hole modification).

### Cytokine Molecules

[0990] Cytokines are generally polypeptides that influence cellular activity, for example, through signal transduction pathways. Accordingly, a cytokine of the multispecific or multifunctional polypeptide is useful and can be associated with receptor-mediated signaling that transmits a signal from outside the cell membrane to modulate a response within the cell. Cytokines are proteinaceous signaling compounds that are mediators of the immune response. They control many different cellular functions including proliferation, differentiation and cell survival/apoptosis; cytokines are also involved in several pathophysiological processes including viral infections and autoimmune diseases. Cytokines are synthesized under various stimuli by a variety of cells of both the innate (monocytes, macrophages, dendritic cells) and adaptive (T- and B-cells) immune systems. Cytokines can be classified into two groups: pro- and anti-inflammatory. Pro-inflammatory cytokines, including IFNγ, IL-1, IL-6 and TNF-alpha, are predominantly derived from the innate immune cells and Thl cells. Anti-inflammatory cytokines, including IL-10, IL-4, IL-13 and IL-5, are synthesized from Th2 immune cells.

[0991] The present disclosure provides, inter alia, multispecific (e.g., bi-, tri-, quad- specific) or multifunctional molecules, that include, e.g., are engineered to contain, one or more cytokine molecules, e.g., immunomodulatory (e.g., proinflammatory) cytokines and variants, e.g., functional variants, thereof. Accordingly, in some embodiments, the cytokine molecule is an interleukin or a variant, e.g., a functional variant thereof. In some embodiments the interleukin is a proinflammatory interleukin. In some embodiments the interleukin is chosen from interleukin-2 (IL-2), interleukin-12 (IL-12), interleukin-15 (IL-15), interleukin-18 (IL-18), interleukin-21 (IL-21), interleukin-7 (IL-7), or interferon gamma. In some embodiments, the cytokine molecule is a proinflammatory cytokine.

[0992] In certain embodiments, the cytokine is a single chain cytokine. In certain embodiments, the cytokine is a multichain cytokine (e.g., the cytokine comprises 2 or more (e.g., 2) polypeptide chains. An exemplary multichain cytokine is IL-12.

[0993] Examples of useful cytokines include, but are not limited to, GM-CSF, IL-1α, IL-1β, IL-2, IL-3, IL-4, IL-5, IL-6, IL-7, IL-8, IL-10, IL-12, IL-21, IFN-α, IFN-β, IFN-γ, MIP-1α, MIP-1β, TGF-β, TNF-α, and TNFβ. In one embodiment the cytokine of the multispecific or multifunctional polypeptide is a cytokine selected from the group of GM-CSF, IL-2, IL-7, IL-8, IL-10, IL-12, IL-15, IL-21, IFN-α, IFN-γ, MIP-1α, MIP-1β and TGF-β. In one embodiment the cytokine of the i the multispecific or multifunctional polypeptide is a cytokine selected from the group of IL-2, IL-7, IL-10, IL-12, IL-15, IFN-α, and IFN-γ. In certain embodiments the cytokine is mutated to remove N- and/or O-glycosylation sites. Elimination of glycosylation increases homogeneity of the product obtainable in recombinant production.

[0994] In one embodiment, the cytokine of the multispecific or multifunctional polypeptide is IL-2. In a specific embodiment, the IL-2 cytokine can elicit one or more of the cellular responses selected from the group consisting of: proliferation in an activated T lymphocyte cell, differentiation in an activated T lymphocyte cell, cytotoxic T cell (CTL) activity, proliferation in an activated B cell, differentiation in an activated B cell, proliferation in a natural killer (NK) cell, differentiation in a NK cell, cytokine secretion by an activated T cell or an NK cell, and NK/lymphocyte activated killer (LAK) cytotoxicity. In another particular embodiment the IL-2 cytokine is a mutant IL-2 cytokine having reduced binding affinity to the .alpha.-subunit of the IL-2 receptor. Together with the .beta.- and .gamma.-subunits (also known as CD122 and CD132, respectively), the .alpha.-subunit (also known as CD25) forms the heterotrimeric high-affinity IL-2 receptor, while the dimeric receptor consisting only of the β- and γ-subunits is termed the intermediate-affinity IL-2 receptor. As described in PCT patent application number PCT/EP2012/051991, which is incorporated herein by reference in its entirety, a mutant IL-2 polypeptide with reduced binding to the .alpha.-subunit of the IL-2 receptor has a reduced ability to induce IL-2 signaling in regulatory T cells, induces less activation-induced cell death (AICD) in T cells, and has a reduced toxicity profile in vivo, compared to a wild-type IL-2 polypeptide. The use of such an cytokine with reduced toxicity is particularly advantageous in a multispecific or multifunctional polypeptide according to the invention, having a long serum half-life due to the presence of an Fc domain. In one embodiment, the mutant IL-2 cytokine of the multispecific or multifunctional polypeptide according to the invention comprises at least one amino acid mutation that reduces or abolishes the affinity of the mutant IL-2 cytokine to the .alpha.-subunit of the IL-2 receptor (CD25) but preserves the affinity of the mutant IL-2 cytokine to the intermediate-affinity IL-2 receptor (consisting of the 0 and y subunits of the IL-2 receptor), compared to the non-mutated IL-2 cytokine. In one embodiment the one or more amino acid mutations are amino acid substitutions. In a specific embodiment, the mutant IL-2 cytokine comprises one, two or three amino acid substitutions at one, two or three position(s) selected from the positions corresponding to residue 42, 45, and 72 of human IL-2. In a more specific embodiment, the mutant IL-2 cytokine comprises three amino acid substitutions at the positions corresponding to residue 42, 45 and 72 of human IL-2. In an even more specific embodiment, the mutant IL-2 cytokine is human IL-2 comprising the amino acid substitutions F42A, Y45A and L72G. In one embodiment the mutant IL-2 cytokine additionally comprises an amino acid mutation at a position corresponding to position 3 of human IL-2, which eliminates the O-glycosylation site of IL-2. Particularly, said additional amino acid mutation is an amino acid substitution replacing a threonine residue by an alanine residue. A particular mutant IL-2 cytokine useful in the invention comprises four amino acid substitutions at positions corresponding to residues 3, 42, 45 and 72 of human IL-2. Specific amino acid substitutions are T3A, F42A, Y45A and L72G. As demonstrated in PCT patent application number PCT/EP2012/051991 and in the appended Examples, said quadruple mutant IL-2 polypeptide (IL-2 qm) exhibits no detectable binding to CD25, reduced ability to induce apoptosis in T cells, reduced ability to induce IL-2 signaling in T.sub.reg cells, and a reduced toxicity profile in vivo. However, it retains ability to activate IL-2 signaling in effector cells, to induce proliferation of effector cells, and to generate IFN-y as a secondary cytokine by NK cells.

[0995] The IL-2 or mutant IL-2 cytokine according to any of the above embodiments may comprise additional mutations that provide further advantages such as increased expression or stability. For example, the cysteine at position 125 may be replaced with a neutral amino acid such as alanine, to avoid the formation of disulfide-bridged IL-2 dimers. Thus, in certain embodiments the IL-2 or mutant IL-2 cytokine of the multispecific or multifunctional polypeptide according to the invention comprises an additional amino acid mutation at a position corresponding to residue 125 of human IL-2. In one embodiment said additional amino acid mutation is the amino acid substitution C125A.

[0996] In a specific embodiment the IL-2 cytokine of the multispecific or multifunctional polypeptide comprises the polypeptide sequence of SEQ ID NO: 227

[APTSSSTKKTQLQLEHLLLDLQMILNGINNYKNPKLTRMLTFKFYMPKKA
TELKHLQCLEEELKPLEEVLNLAQSKNFHLRPRDLISNINVIVLELKGSET
TFMCEYADETATIVEFLNRWITFAQSIISTLT].

[0997] In another specific embodiment the IL-2 cytokine of the multispecific or multifunctional polypeptide comprises the polypeptide sequence of SEQ ID NO: 228

[APASSSTKKTQLQLEHLLLDLQMILNGINNYKNPKLTRMLTAKFAMPKKA
TELKHLQCLEEELKPLEEVLNGAQSKNFHLRPRDLISNINVIVLELKGSET
TFMCEYADETATIVEFLNRWITFAQSIISTLT].

[0998] In another embodiment the cytokine of the multispecific or multifunctional polypeptide is IL-12. In a specific embodiment said IL-12 cytokine is a single chain IL-12 cytokine. In an even more specific embodiment the single chain IL-12 cytokine comprises the polypeptide sequence of SEQ ID NO: 229 [IWELKKDVYVVELDWYPDAPGEMVVLTCDTPEEDGITWTLDQSSEVLGSGKTLTIQVK EFGDAGQYTCHKGGEVLSHSLLLLHKKEDGIWSTDILKDQKEPKNKTFLRCEAKNYSGR FTCWWLTTISTDLTFSVKSSRGSSDPQGVTCGAATLSAERVRGDNKEYEYSVECQEDSA CPAAEESLPIEVMVDAVHKLKYENYTSSFFIRDIIKPDPPKNLQLKPLKNSRQVEVSWEY PDTWSTPHSYFSLTFCVQVQGKSKREKKDRVFTDKTSATVICRKNASISVRAQDRYYSS SWSEWASVPCSGGGGSGGGGSGGGGSRNLPVATPDPGMFPCLHESQNLLRAVSNMLQ KARQTLEFYPCTSEEIDHEDITKDKTSTVEACLPLELTKNESCLNSRETSFITNGSCLASRK TSFMMALCLSSIYEDLKMYQVEFKTMNAKLLMDPKRQIFLDQNMLAVIDELMQALNFN SETVPQKSSLEEPDFYKTKIKLCILLHAFRIRAVTIDRVMSYLNAS]. In one embodiment, the IL-12 cytokine can elicit one or more of the cellular responses selected from the group consisting of: proliferation in a NK cell, differentiation in a NK cell, proliferation in a T cell, and differentiation in a T cell.

[0999] In another embodiment the cytokine of the multispecific or multifunctional polypeptide is IL-10. In a specific embodiment said IL-10 cytokine is a single chain IL-10 cytokine. In an even more specific embodiment the single chain IL-10 cytokine comprises the polypeptide sequence of SEQ ID NO: 3471

[SPGQGTQSENSCTHFPGNLPNMLRDLRDAFSRVKTFFQMKDQLDNLLLKE
SLLEDFKGYLGCQALSEMIQFYLEEVMPQAENQDPDIKAHVNSLGENLKTL
RLRLRRCHRFLPCENKSKAVEQVKNAFNKLQEKGIYKAMSEFDIFINYIEA
YMTMKIRNGGGGSGGGGSGGGGSGGGGSSPGQGTQSENSCTHFPGNLPNML
RDLRDAFSRVKTFFQMKDQLDNLLLKESLLEDFKGYLGCQALSEMIQFYLE
EVMPQAENQDPDIKAHVNSLGENLKTLRLRLRRCHRFLPCENKSKAVEQVK
NAFNKLQEKGIYKAMSEFDIFINYIEAYMTMKIRN].

[1000] In another specific embodiment the IL-10 cytokine is a monomeric IL-10 cytokine. In a more specific embodiment the monomeric IL-10 cytokine comprises the polypeptide sequence of SEQ ID NO: 3472 [SPGQGTQSENSCTHFPGNLPNMLRDLRDAFSRVKTFFQMKDQLDNLLLKESLLEDFKG YLGCQALSEMIQFYLEEVMPQAENQDPDIKAHVNSLGENLKTLRLRLRRCHRFLPCENG GGSGGKSKAVEQVKNAFNKLQEKGIYKAMSEFDIFINYIEAYMTMKIRN]. In one embodiment, the IL-10 cytokine can elicit one or more of the cellular responses selected from the group consisting of: inhibition of cytokine secretion, inhibition of antigen presentation by antigen presenting cells, reduction of oxygen radical release, and inhibition of T cell proliferation. A multispecific or multifunctional polypeptide according to the invention wherein the cytokine is IL-10 is particularly useful for downregulation of inflammation, e.g. in the treatment of an inflammatory disorder.

[1001] In another embodiment, the cytokine of the multispecific or multifunctional polypeptide is IL-15. In a specific embodiment said IL-15 cytokine is a mutant IL-15 cytokine having reduced binding affinity to the a-subunit of the IL-15 receptor. Without wishing to be bound by theory, a mutant IL-15 polypeptide with reduced binding to the .alpha.-subunit of the IL-15 receptor has a reduced ability to bind to fibroblasts throughout the body, resulting in improved pharmacokinetics and toxicity profile, compared to a wild-type IL-15 polypeptide. The use of an cytokine with reduced toxicity, such as the described mutant IL-2 and mutant IL-15 effector moieties, is particularly advantageous in a multispecific or multifunctional polypeptide according to the invention, having a long serum half-life due to the presence of an Fc domain. In one embodiment the mutant IL-15 cytokine of the multispecific or multifunctional polypeptide according to the invention comprises at least one amino acid mutation that reduces or abolishes the affinity of the mutant IL-15 cytokine to the .alpha.-subunit of the IL-15 receptor but preserves the affinity of the mutant IL-15 cytokine to the intermediate-affinity IL-15/IL-2 receptor (consisting of the .beta.- and .gamma.-subunits of the IL-15/IL-2 receptor), compared to the non-mutated IL-15 cytokine. In one embodiment the amino acid mutation is an amino acid substitution. In a specific embodiment, the mutant IL-15 cytokine comprises an amino acid substitution at the position corresponding to residue 53 of human IL-15. In a more specific embodiment, the mutant IL-15 cytokine is human IL-15 comprising the amino acid substitution E53A. In one embodiment the mutant IL-15 cytokine additionally comprises an amino acid mutation at a position corresponding to position 79 of human IL-15, which eliminates the N-glycosylation site of IL-15. Particularly, said additional amino acid mutation is an amino acid substitution replacing an asparagine residue by an alanine residue. In an even more specific embodiment the IL-15 cytokine comprises the polypeptide sequence of SEQ ID NO: 3473 [NWVNVISDLKKIEDLIQSMHIDATLYTESDVHPSCKVTAMKCFLLELQVISLASGDASIH DTVENLIILANNSLSSNGAVTESGCKECEELEEKNIKEFLQSFVHIVQMFINT S]. In one embodiment, the IL-15 cytokine can elicit one or more of the cellular responses selected from the group consisting of: proliferation in an activated T lymphocyte cell, differentiation in an activated T lymphocyte cell, cytotoxic T cell (CTL) activity, proliferation in an activated B cell, differentiation in an activated B cell, proliferation in a natural killer (NK) cell, differentiation in a NK cell, cytokine secretion by an activated T cell or an NK cell, and NK/lymphocyte activated killer (LAK) cytotoxicity.

[1002] Mutant cytokine molecules useful as effector moieties in the multispecific or multifunctional polypeptide can be prepared by deletion, substitution, insertion or modification using genetic or chemical methods well known in the art. Genetic methods may include site-specific mutagenesis of the encoding DNA sequence, PCR, gene synthesis, and the like. The correct nucleotide changes can be verified for example by sequencing. Substitution or insertion may involve natural as well as non-natural amino acid residues. Amino acid modification includes well known methods of chemical modification such as the addition or removal of glycosylation sites or carbohydrate attachments, and the like.

[1003] In one embodiment, the cytokine, particularly a single-chain cytokine, of the multispecific or multifunctional polypeptide is GM-CSF. In a specific embodiment, the GM-CSF cytokine can elicit proliferation and/or differentiation in a granulocyte, a monocyte or a dendritic cell. In one embodiment, the cytokine, particularly a single-chain cytokine, of the multispecific or multifunctional polypeptide is IFN-α. In a specific embodiment, the IFN-α cytokine can elicit one or more of the cellular responses selected from the group consisting of: inhibiting viral replication in a virus-infected cell, and upregulating the expression of major histocompatibility complex I (MHC I). In another specific embodiment, the IFN-α cytokine can inhibit proliferation in a cell. In one embodiment the cytokine, particularly a single-chain cytokine, of the multispecific or multifunctional polypeptide is IFNγ. In a specific embodiment, the IFN-γ cytokine can elicit one or more of the cellular responses selected from the group of: increased macrophage activity, increased expression of MHC molecules, and increased NK cell activity. In one embodiment the cytokine, particularly a single-chain cytokine, of the multispecific or multifunctional polypeptide is IL-7. In a specific embodiment, the IL-7 cytokine can elicit proliferation of T and/or B lymphocytes. In one embodiment, the cytokine, particularly a single-chain cytokine, of the multispecific or multifunctional polypeptide is IL-8. In a specific embodiment, the IL-8 cytokine can elicit chemotaxis in neutrophils. In one embodiment, the cytokine, particularly a single-chain cytokine, of the multispecific or multifunctional polypeptide, is MIP-1α. In a specific embodiment, the MIP-la cytokine can elicit chemotaxis in monocytes and T lymphocyte cells. In one embodiment, the cytokine, particularly a single-chain cytokine, of the multispecific or multifunctional polypeptide is MIP-1β. In a specific embodiment, the MIP-1β cytokine can elicit chemotaxis in monocytes and T lymphocyte cells. In one embodiment, the cytokine, particularly a single-chain cytokine, of the multispecific or multifunctional polypeptide is TGF-β. In a specific embodiment, the TGF-β cytokine can elicit one or more of the cellular responses selected from the group consisting of: chemotaxis in monocytes, chemotaxis in macrophages, upregulation of IL-1 expression in activated macrophages, and upregulation of IgA expression in activated B cells.

[1004] In one embodiment, the multispecific or multifunctional polypeptide of the invention binds to an cytokine receptor with a dissociation constant (K_{D}) that is at least about 1, 1.5, 2, 2.5, 3, 3.5, 4, 4.5, 5, 5.5, 6, 6.5, 7, 7.5, 8, 8.5, 9, 9.5 or 10 times greater than that for a control cytokine. In another embodiment, the multispecific or multifunctional polypeptide binds to an cytokine receptor with a K_{D} that is at least 2, 3, 4, 5, 6, 7, 8, 9, or 10 times greater than that for a corresponding multispecific or multifunctional polypeptide comprising two or more effector moieties. In another embodiment, the multispecific or multifunctional polypeptide binds to an cytokine receptor with a dissociation constant K_{D} that is about 10 times greater than that for a corresponding the multispecific or multifunctional polypeptide comprising two or more cytokines.

[1005] In some embodiments, the multispecific molecules disclosed herein include a cytokine molecule. In embodiments, the cytokine molecule includes a full length, a fragment or a variant of a cytokine; a cytokine receptor domain, e.g., a cytokine receptor dimerizing domain; or an agonist of a cytokine receptor, e.g., an antibody molecule (e.g., an agonistic antibody) to a cytokine receptor.

[1006] In some embodiments the cytokine molecule is chosen from IL-2, IL-12, IL-15, IL-18, IL-7, IL-21, or interferon gamma, or a fragment or variant thereof, or a combination of any of the aforesaid cytokines. The cytokine molecule can be a monomer or a dimer. In embodiments, the cytokine molecule can further include a cytokine receptor dimerizing domain.

[1007] In other embodiments, the cytokine molecule is an agonist of a cytokine receptor, e.g., an antibody molecule (e.g., an agonistic antibody) to a cytokine receptor chosen from an IL-15Ra or IL-21R.

[1008] In one embodiment, the cytokine molecule is IL-15, e.g., human IL-15 (e.g., comprising the amino acid sequence: NWVNVISDLKKIEDLIQSMHIDATLYTESDVHPSCKVTAMKCFLLELQVISLESGDASIH DTVENLIILANNSLSSNGNVTESGCKECEELEEKNIKEFLQSFVHIVQMFINTS (SEQ ID NO: 3437), a fragment thereof, or an amino acid sequence substantially identical thereto (e.g., 95% to 99.9% identical thereto, or having at least one amino acid alteration, but not more than five, ten or fifteen alterations (e.g., substitutions, deletions, or insertions, e.g., conservative substitutions) to the amino acid sequence of SEQ ID NO: 3437.

[1009] In some embodiments, the cytokine molecule comprises a receptor dimerizing domain, e.g., an IL15Ralpha dimerizing domain. In one embodiment, the IL15Ralpha dimerizing domain comprises the amino acid sequence: MAPRRARGCRTLGLPALLLLLLLRPPATRGITCPPPMSVEHADIWVKSYSLYSRERYICN SGFKRKAGTSSLTECVL (SEQ ID NO: 3438), a fragment thereof, or an amino acid sequence substantially identical thereto (e.g., 95% to 99.9% identical thereto, or having at least one amino acid alteration, but not more than five, ten or fifteen alterations (e.g., substitutions, deletions, or insertions, e.g., conservative substitutions) to the amino acid sequence of SEQ ID NO: 3438. In some embodiments, the cytokine molecule (e.g., IL-15) and the receptor dimerizing domain (e.g., an IL15Ralpha dimerizing domain) of the multispecific molecule are covalently linked, e.g., via a linker (e.g., a Gly-Ser linker, e.g., a linker comprising the amino acid sequence SGGSGGGGSGGGSGGGGSLQ (SEQ ID NO: 3439). In other embodiments, the cytokine molecule (e.g., IL-15) and the receptor dimerizing domain (e.g., an IL15Ralpha dimerizing domain) of the multispecific molecule are not covalently linked, e.g., are non-covalently associated.

[1010] In other embodiments, the cytokine molecule is IL-2, e.g., human IL-2 (e.g., comprising the amino acid sequence: APTS S STKKTQLQLEHLLLDLQMILNGINNYKNPKLTRMLTFKFYMPKKATELKHLQCL EEELKPLEEVLNLAQSKNFHLRPRDLISNINVIVLELKGSETTFMCEYADETATIVEFLNR WITFCQSIISTLT (SEQ ID NO: 3440), a fragment thereof, or an amino acid sequence substantially identical thereto (e.g., 95% to 99.9% identical thereto, or having at least one amino acid alteration, but not more than five, ten or fifteen alterations (e.g., substitutions, deletions, or insertions, e.g., conservative substitutions) to the amino acid sequence of SEQ ID NO: 3440).

[1011] In other embodiments, the cytokine molecule is IL-18, e.g., human IL-18 (e.g., comprising the amino acid sequence: YFGKLESKLSVIRNLNDQVLFIDQGNRPLFEDMTDSDCRDNAPRTIFIISMYKDSQPRGM AVTISVKCEKISTLSCENKIISFKEMNPPDNIKDTKSDIIFFQRSVPGHDNKMQFESSSYEG YFLACEKERDLFKLILKKEDELGDRSIMFTVQNED (SEQ ID NO: 121), a fragment thereof, or an amino acid sequence substantially identical thereto (e.g., 95% to 99.9% identical thereto, or having at least one amino acid alteration, but not more than five, ten or fifteen alterations (e.g., substitutions, deletions, or insertions, e.g., conservative substitutions) to the amino acid sequence of SEQ ID NO: 3441).

[1012] In other embodiments, the cytokine molecule is IL-21, e.g., human IL-21 (e.g., comprising the amino acid sequence: QGQDRHMIRMRQLIDIVDQLKNYVNDLVPEFLPAPEDVETNCEWSAFSCFQKAQLKSA NTGNNERIINVSIKKLKRKPPSTNAGRRQKHRLTCPSCDSYEKKPPKEFLERFKSLLQKMI HQHLSSRTHGSEDS (SEQ ID NO: 3442), a fragment thereof, or an amino acid sequence substantially identical thereto (e.g., 95% to 99.9% identical thereto, or having at least one amino acid alteration, but not more than five, ten or fifteen alterations (e.g., substitutions, deletions, or insertions, e.g., conservative substitutions) to the amino acid sequence of SEQ ID NO: 3442).

[1013] In yet other embodiments, the cytokine molecule is interferon gamma, e.g., human interferon gamma (e.g., comprising the amino acid sequence: QDPYVKEAENLKKYFNAGHSDVADNGTLFLGILKNWKEESDRKINIQSQIVSFYFKLFK NFKDDQSIQKSVETIKEDMNVKFFNSNKKKRDDFEKLTNYSVTDLNVQRKAIHELIQVM AELSPAAKTGKRKRSQMLFRG (SEQ ID NO: 3443), a fragment thereof, or an amino acid sequence substantially identical thereto (e.g., 95% to 99.9% identical thereto, or having at least one amino acid alteration, but not more than five, ten or fifteen alterations (e.g., substitutions, deletions, or insertions, e.g., conservative substitutions) to the amino acid sequence of SEQ ID NO: 3443).

### Immune Cell Engagers

[1014] The immune cell engagers, e.g., first and/or second immune cell engager, of the multispecific or multifunctional molecules disclosed herein can mediate binding to, and/or activation of, an immune cell, e.g., an immune effector cell. In some embodiments, the immune cell is chosen from a T cell, an NK cell, a B cell, a dendritic cell, or a macrophage cell engager, or a combination thereof. In some embodiments, the immune cell engager is chosen from one, two, three, or all of a T cell engager, NK cell engager, a B cell engager, a dendritic cell engager, or a macrophage cell engager, or a combination thereof. The immune cell engager can be an agonist of the immune system. In some embodiments, the immune cell engager can be an antibody molecule, a ligand molecule (e.g., a ligand that further comprises an immunoglobulin constant region, e.g., an Fc region), a small molecule, a nucleotide molecule.

### Natural Killer Cell Engagers

[1015] Natural Killer (NK) cells recognize and destroy infected cells in an antibody-independent manner. The regulation of NK cells is mediated by activating and inhibiting receptors on the NK cell surface. One family of activating receptors is the natural cytotoxicity receptors (NCRs) which include NKp30, NKp44 and NKp46. The NCRs initiate targeting by recognition of heparan sulfate on cells. NKG2D is a receptor that provides both stimulatory and costimulatory innate immune responses on activated killer (NK) cells, leading to cytotoxic activity. DNAM1 is a receptor involved in intercellular adhesion, lymphocyte signaling, cytotoxicity and lymphokine secretion mediated by cytotoxic T-lymphocyte (CTL) and NK cell. DAP10 (also known as HCST) is a transmembrane adapter protein which associates with KLRK1 to form an activation receptor KLRK1-HCST in lymphoid and myeloid cells; this receptor plays a major role in triggering cytotoxicity against target cells expressing cell surface ligands such as MHC class I chain-related MICA and MICB, and U(optionally L1)6-binding proteins (ULBPs); it KLRK1-HCST receptor plays a role in immune surveillance is involved cytolysis of cells; indeed, melanoma cells that do not express KLRK1 ligands escape from immune surveillance mediated by NK cells. CD16 is a receptor for the Fc region of IgG, which binds complexed or aggregated IgG and also monomeric IgG and thereby mediates antibody-dependent cellular cytotoxicity (ADCC) and other antibody-dependent responses, such as phagocytosis.

[1016] In some embodiments, the NK cell engager is a viral hemagglutinin (HA), HA is a glycoprotein found on the surface of influenza viruses. It is responsible for binding the virus to cells with sialic acid on the membranes, such as cells in the upper respiratory tract or erythrocytes. HA has at least 18 different antigens. These subtypes are named H1 through H18. NCRs can recognize viral proteins. NKp46 has been shown to be able to interact with the HA of influenza and the HA-NA of Paramyxovirus, including Sendai virus and Newcastle disease virus. Besides NKp46, NKp44 can also functionally interact with HA of different influenza subtypes.

[1017] The present disclosure provides, inter alfa, multispecific (e.g., bi-, tri-, quad- specific) or multifunctional molecules, that are engineered to contain one or more NK cell engagers that mediate binding to and/or activation of an NK cell. Accordingly, in some embodiments, the NK cell engager is selected from an antigen binding domain or ligand that binds to (e.g., activates): NKp30, NKp40, NKp44, NKp46, NKG2D, DNAM1, DAP10, CD16 (e.g., CD16a, CD16b, or both), CRTAM, CD27, PSGL1, CD96, CD100 (SEMA4D), NKp80, CD244 (also known as SLAMF4 or 2B4), SLAMF6, SLAMF7, KIR2DS2, KIR2DS4, KIR3DS1, KIR2DS3, KIR2DS5, KIR2DS1, CD94, NKG2C, NKG2E, or CD160.

[1018] In one embodiment, the NK cell engager is a ligand of NKp30 is a B7-6, e.g., comprises the amino acid sequence of: DLKVEMMAGGTQITPLNDNVTIFCNIFYSQPLNITSMGITWFWKSLTFDKEVKVFEFFGD HQEAFRPGAIVSPWRLKSGDASLRLPGIQLEEAGEYRCEVVVTPLKAQGTVQLEVVASP ASRLLLDQVGMKENEDKYMCES SGFYPEAINITWEKQTQKFPHPIEISEDVITGPTIKNM DGTFNVTSCLKLNSSQEDPGTVYQCVVRHASLHTPLRSNFTLTAARHSLSETEKTDNFS (SEQ ID NO: 3444), a fragment thereof, or an amino acid sequence substantially identical thereto (e.g., 95% to 99.9% identical thereto, or having at least one amino acid alteration, but not more than five, ten or fifteen alterations (e.g., substitutions, deletions, or insertions, e.g., conservative substitutions) to the amino acid sequence of SEQ ID NO: 3444.

[1019] In other embodiments, the NK cell engager is a ligand of NKp44 or NKp46, which is a viral HA. Viral hemagglutinins (HA) are glyco proteins which are on the surface of viruses. HA proteins allow viruses to bind to the membrane of cells via sialic acid sugar moieties which contributes to the fusion of viral membranes with the cell membranes (see e.g., Eur J Immunol. 2001 Sep;31(9):2680-9 “Recognition of viral hemagglutinins by NKp44 but not by NKp30”; and Nature. 2001 Feb 22;409(6823):1055-60 “Recognition of haemagglutinins on virus-infected cells by NKp46 activates lysis by human NK cells” the contents of each of which are incorporated by reference herein).

[1020] In other embodiments, the NK cell engager is a ligand of NKG2D chosen from MICA, MICB, or ULBP1, e.g., wherein:
[1021] (i) MICA comprises the amino acid sequence: EPHSLRYNLTVLSWDGSVQSGFLTEVHLDGQPFLRCDRQKCRAKPQGQWAEDVLGNK TWDRETRDLTGNGKDLRMTLAHIKDQKEGLHSLQEIRVCEIHEDNSTRSSQHFYYDGEL FLSQNLETKEWTMPQSSRAQTLAMNVRNFLKEDAMKTKTHYHAMHADCLQELRRYLK SGVVLRRTVPPMVNVTRSEASEGNITVTCRASGFYPWNITLSWRQDGVSLSHDTQQWG DVLPDGNGTYQTWVATRICQGEEQRFTCYMEHSGNHSTHPVPSGKVLVLQSHW (SEQ ID NO: 3445), a fragment thereof, or an amino acid sequence substantially identical thereto (e.g., 95% to 99.9% identical thereto, or having at least one amino acid alteration, but not more than five, ten or fifteen alterations (e.g., substitutions, deletions, or insertions, e.g., conservative substitutions) to the amino acid sequence of SEQ ID NO: 3445;
[1022] (ii) MICB comprises the amino acid sequence: AEPHSLRYNLMVLSQDESVQSGFLAEGHLDGQPFLRYDRQKRRAKPQGQWAEDVLGA KTWDTETEDLTENGQDLRRTLTHIKDQKGGLHSLQEIRVCEIHEDSSTRGSRHFYYDGEL FLSQNLETQESTVPQSSRAQTLAMNVTNFWKEDAMKTKTHYRAMQADCLQKLQRYLK SGVAIRRTVPPMVNVTCSEVSEGNITVTCRASSFYPRNITLTWRQDGVSLSHNTQQWGD VLPDGNGTYQTWVATRIRQGEEQRFTCYMEHSGNHGTHPVPSGKVLVLQSQRTD (SEQ ID NO: 3446), a fragment thereof, or an amino acid sequence substantially identical thereto (e.g., 95% to 99.9% identical thereto, or having at least one amino acid alteration, but not more than five, ten or fifteen alterations (e.g., substitutions, deletions, or insertions, e.g., conservative substitutions) to the amino acid sequence of SEQ ID NO: 3446; or (iii) ULBP1 comprises the amino acid sequence: GWVDTHCLCYDFIITPKSRPEPQWCEVQGLVDERPFLHYDCVNHKAKAFASLGKKVNV TKTWEEQTETLRDVVDFLKGQLLDIQVENLIPIEPLTLQARMSCEHEAHGHGRGSWQFL FNGQKFLLFD SNNRKWTALHPGAKKMTEKWEKNRDVTMFFQKISLGDCKMWLEEFL MYWEQMLDPTKPPSLAPG (SEQ ID NO: 3447), a fragment thereof, or an amino acid sequence substantially identical thereto (e.g., 95% to 99.9% identical thereto, or having at least one amino acid alteration, but not more than five, ten or fifteen alterations (e.g., substitutions, deletions, or insertions, e.g., conservative substitutions) to the amino acid sequence of SEQ ID NO: 3447.

[1023] In other embodiments, the NK cell engager is a ligand of DNAM1 chosen from NECTIN2 or NECL5, e.g., wherein:
[1024] (i) NECTIN2 comprises the amino acid sequence: QDVRVQVLPEVRGQLGGTVELPCHLLPPVPGLYISLVTWQRPDAPANHQNVAAFHPKM GPSFPSPKPGSERLSFVSAKQ STGQDTEAELQDATLALHGLTVEDEGNYTCEFATFPKGS VRGMTWLRVIAKPKNQAEAQKVTFSQDPTTVALCISKEGRPPARISWLSSLDWEAKETQ VSGTLAGTVTVTSRFTLVPSGRADGVTVTCKVEHESFEEPALIPVTLSVRYPPEVSISGYD DNWYLGRTDATLSCDVRSNPEPTGYDWSTTSGTFPTSAVAQGSQLVIHAVD SLFNTTF V CTVTNAVGMGRAEQVIFVRETPNTAGAGATGG (SEQ ID NO: 3448), a fragment thereof, or an amino acid sequence substantially identical thereto (e.g., 95% to 99.9% identical thereto, or having at least one amino acid alteration, but not more than five, ten or fifteen alterations (e.g., substitutions, deletions, or insertions, e.g., conservative substitutions) to the amino acid sequence of SEQ ID NO: 3448; or
[1025] (ii) NECLS comprises the amino acid sequence: WPPPGTGDVVVQAPTQVPGFLGDSVTLPCYLQVPNMEVTHVSQLTWARHGESGSMAV FHQTQGPSYSESKRLEFVAARLGAELRNASLRMFGLRVEDEGNYTCLFVTFPQGSRSVD IWLRVLAKPQNTAEVQKVQLTGEPVPMARCVSTGGRPPAQITWHSDLGGMPNTSQVPG FLSGTVTVTSLWILVPSSQVDGKNVTCKVEHESFEKPQLLTVNLTVYYPPEVSISGYDNN WYLGQNEATLTCDARSNPEPTGYNWSTTMGPLPPFAVAQGAQLLIRPVDKPINTTLICN VTNALGARQAELTVQVKEGPPSEHSGISRN (SEQ ID NO: 3449), a fragment thereof, or an amino acid sequence substantially identical thereto (e.g., 95% to 99.9% identical thereto, or having at least one amino acid alteration, but not more than five, ten or fifteen alterations (e.g., substitutions, deletions, or insertions, e.g., conservative substitutions) to the amino acid sequence of SEQ ID NO: 3449.

[1026] In yet other embodiments, the NK cell engager is a ligand of DAP10, which is an adapter for NKG2D (see e.g., Proc Natl Acad Sci U S A. 2005 May 24; 102(21): 7641-7646; and Blood, 15 September 2011 Volume 118, Number 11, the full contents of each of which is incorporated by reference herein).

[1027] In other embodiments, the NK cell engager is a ligand of CD16, which is a CD16a/b ligand, e.g., a CD16a/b ligand further comprising an antibody Fc region (see e.g., Front Immunol. 2013; 4: 76 discusses how antibodies use the Fc to trigger NK cells through CD16,the full contents of which are incorporated herein).

[1028] In other embodiments, the NK cell engager is a ligand of CRTAM, which is NECL2, e.g., wherein NECL2 comprises the amino acid sequence: QNLFTKDVTVIEGEVATISCQVNKSDDSVIQLLNPNRQTIYFRDFRPLKDSRFQLLNFSSS ELKVSLTNVSISDEGRYFCQLYTDPPQESYTTITVLVPPRNLMIDIQKDTAVEGEEIEVNC TAMASKPATTIRWFKGNTELKGKSEVEEWSDMYTVTSQLMLKVHKEDDGVPVICQVE HPAVTGNLQTQRYLEVQYKPQVHIQMTYPLQGLTREGDALELTCEAIGKPQPVMVTWV RVDDEMPQHAVLSGPNLFINNLNKTDNGTYRCEASNIVGKAHSDYMLYVYDPPTTIPPP TTTTTTTTTTTTTILTIITDSRAGEEGSIRAVDH (SEQ ID NO: 3450), a fragment thereof, or an amino acid sequence substantially identical thereto (e.g., 95% to 99.9% identical thereto, or having at least one amino acid alteration, but not more than five, ten or fifteen alterations (e.g., substitutions, deletions, or insertions, e.g., conservative substitutions) to the amino acid sequence of SEQ ID NO: 3450.

[1029] In other embodiments, the NK cell engager is a ligand of CD27, which is CD70, e.g., wherein CD70 comprises the amino acid sequence: QRFAQAQQQLPLESLGWDVAELQLNHTGPQQDPRLYWQGGPALGRSFLHGPELDKGQ LRIHRDGIYMVHIQVTLAICSSTTASRHHPTTLAVGICSPASRSISLLRLSFHQGCTIASQR LTPLARGDTLCTNLTGTLLPSRNTDETFFGVQWVRP (SEQ ID NO: 3451), a fragment thereof, or an amino acid sequence substantially identical thereto (e.g., 95% to 99.9% identical thereto, or having at least one amino acid alteration, but not more than five, ten or fifteen alterations (e.g., substitutions, deletions, or insertions, e.g., conservative substitutions) to the amino acid sequence of SEQ ID NO: 3451.

[1030] In other embodiments, the NK cell engager is a ligand of PSGL1, which is L-selectin (CD62L), e.g., wherein L-selectin comprises the amino acid sequence: WTYHYSEKPMNWQRARRFCRDNYTDLVAIQNKAEIEYLEKTLPF SRSYYWIGIRKIGGI WTWVGTNKSLTEEAENWGDGEPNNKKNKEDCVEIYIKRNKDAGKWNDDACHKLKAA LCYTASCQPWSCSGHGECVEIINNYTCNCDVGYYGPQCQFVIQCEPLEAPELGTMDCTH PLGNFSFSSQCAFSCSEGTNLTGIEETTCGPFGNWSSPEPTCQVIQCEPLSAPDLGIMNCSH PLASFSFTSACTFICSEGTELIGKKKTICESSGIWSNPSPICQKLDKSFSMIKEGDYN (SEQ ID NO: 3452), a fragment thereof, or an amino acid sequence substantially identical thereto (e.g., 95% to 99.9% identical thereto, or having at least one amino acid alteration, but not more than five, ten or fifteen alterations (e.g., substitutions, deletions, or insertions, e.g., conservative substitutions) to the amino acid sequence of SEQ ID NO: 3452.

[1031] In other embodiments, the NK cell engager is a ligand of CD96, which is NECLS, e.g., wherein NECLS comprises the amino acid sequence: WPPPGTGDVVVQAPTQVPGFLGDSVTLPCYLQVPNMEVTHVSQLTWARHGESGSMAV FHQTQGPSYSESKRLEFVAARLGAELRNASLRMFGLRVEDEGNYTCLFVTFPQGSRSVD IWLRVLAKPQNTAEVQKVQLTGEPVPMARCVSTGGRPPAQITWHSDLGGMPNTSQVPG FLSGTVTVTSLWILVPSSQVDGKNVTCKVEHESFEKPQLLTVNLTVYYPPEVSISGYDNN WYLGQNEATLTCDARSNPEPTGYNWSTTMGPLPPFAVAQGAQLLIRPVDKPINTTLICN VTNALGARQAELTVQVKEGPPSEHSGISRN (SEQ ID NO: 3449), a fragment thereof, or an amino acid sequence substantially identical thereto (e.g., 95% to 99.9% identical thereto, or having at least one amino acid alteration, but not more than five, ten or fifteen alterations (e.g., substitutions, deletions, or insertions, e.g., conservative substitutions) to the amino acid sequence of SEQ ID NO: 3449.

[1032] In other embodiments, the NK cell engager is a ligand of CD100 (SEMA4D), which is CD72, e.g., wherein CD72 comprises the amino acid sequence: RYLQVSQQLQQTNRVLEVTNSSLRQQLRLKITQLGQSAEDLQGSRRELAQSQEALQVEQ RAHQAAEGQLQACQADRQKTKETLQSEEQQRRALEQKLSNMENRLKPFFTCGSADTCC PSGWIMHQKSCFYISLTSKNWQESQKQCETLSSKLATFSEIYPQSHSYYFLNSLLPNGGS GNSYWTGLSSNKDWKLTDDTQRTRTYAQSSKCNKVHKTWSWWTLESESCRSSLPYICE MTAFRFPD (SEQ ID NO: 3453), a fragment thereof, or an amino acid sequence substantially identical thereto (e.g., 95% to 99.9% identical thereto, or having at least one amino acid alteration, but not more than five, ten or fifteen alterations (e.g., substitutions, deletions, or insertions, e.g., conservative substitutions) to the amino acid sequence of SEQ ID NO: 3453.

[1033] In other embodiments, the NK cell engager is a ligand of NKp80, which is CLEC2B (AICL), e.g., wherein CLEC2B (AICL) comprises the amino acid sequence: KLTRDSQSLCPYDWIGFQNKCYYFSKEEGDWNSSKYNCSTQHADLTIIDNIEEMNFLRR YKCSSDHWIGLKMAKNRTGQWVDGATFTKSFGMRGSEGCAYLSDDGAATARCYTER KWICRKRIH (SEQ ID NO: 3454), a fragment thereof, or an amino acid sequence substantially identical thereto (e.g., 95% to 99.9% identical thereto, or having at least one amino acid alteration, but not more than five, ten or fifteen alterations (e.g., substitutions, deletions, or insertions, e.g., conservative substitutions) to the amino acid sequence of SEQ ID NO: 3454.

[1034] In other embodiments, the NK cell engager is a ligand of CD244, which is CD48, e.g., wherein CD48 comprises the amino acid sequence: QGHLVHMTVVSGSNVTLNISESLPENYKQLTWFYTFDQKIVEWDSRKSKYFESKFKGR VRLDPQSGALYISKVQKEDNSTYIMRVLKKTGNEQEWKIKLQVLDPVPKPVIKIEKIEDM DDNCYLKLSCVIPGESVNYTWYGDKRPFPKELQNSVLETTLMPHNYSRCYTCQVSNSVS SKNGTVCLSPPCTLARS (SEQ ID NO: 3455), a fragment thereof, or an amino acid sequence substantially identical thereto (e.g., 95% to 99.9% identical thereto, or having at least one amino acid alteration, but not more than five, ten or fifteen alterations (e.g., substitutions, deletions, or insertions, e.g., conservative substitutions) to the amino acid sequence of SEQ ID NO: 3455.

### T Cell Engagers

[1035] The present disclosure provides, inter alia, multispecific (e.g., bi-, tri-, quad- specific) or multifunctional molecules, that are engineered to contain one or more T cell engager that mediate binding to and/or activation of a T cell. In some embodiments, the T cell engager is an antigen binding domain that binds to, e.g., activates TCRβ, e.g., a TCRβ V region, as described herein. In some embodiments, the T cell engager is selected from an antigen binding domain or ligand that binds to (e.g., and in some embodiments activates) one or more of CD3, TCRα, TCRγ, TCRζ, ICOS, CD28, CD27, HVEM, LIGHT, CD40, 4-1BB, OX40, DR3, GITR, CD30, TIM1, SLAM, CD2, or CD226. In other embodiments, the T cell engager is selected from an antigen binding domain or ligand that binds to and does not activate one or more of CD3, TCRα, TCRγ, TCRζ, ICOS, CD28, CD27, HVEM, LIGHT, CD40, 4-1BB, OX40, DR3, GITR, CD30, TIM1, SLAM, CD2, or CD226.

### B Cell, Macrophage & Dendritic Cell Engagers

[1036] Broadly, B cells, also known as B lymphocytes, are a type of white blood cell of the lymphocyte subtype. They function in the humoral immunity component of the adaptive immune system by secreting antibodies. Additionally, B cells present antigen (they are also classified as professional antigen-presenting cells (APCs)) and secrete cytokines. Macrophages are a type of white blood cell that engulfs and digests cellular debris, foreign substances, microbes, and other infectious agents via phagocytosis. Besides phagocytosis, they play important roles in nonspecific defense (innate immunity) and also help initiate specific defense mechanisms (adaptive immunity) by recruiting other immune cells such as lymphocytes. For example, they are important as antigen presenters to T cells. Beyond increasing inflammation and stimulating the immune system, macrophages also play an important anti-inflammatory role and can decrease immune reactions through the release of cytokines. Dendritic cells (DCs) are antigen-presenting cells that function in processing antigen material and present it on the cell surface to the T cells of the immune system.

[1037] The present disclosure provides, inter alfa, multispecific (e.g., bi-, tri-, quad- specific) or multifunctional molecules, that include, e.g., are engineered to contain, one or more B cell, macrophage, and/or dendritic cell engager that mediate binding to and/or activation of a B cell, macrophage, and/or dendritic cell.

[1038] Accordingly, in some embodiments, the immune cell engager comprises a B cell, macrophage, and/or dendritic cell engager chosen from one or more of CD40 ligand (CD4OL) or a CD70 ligand; an antibody molecule that binds to CD40 or CD70; an antibody molecule to OX40; an OX40 ligand (OX4OL); an agonist of a Toll-like receptor (e.g., as described herein, e.g., a TLR4, e.g., a constitutively active TLR4 (caTLR4), or a TLR9 agonists); a 41BB; a CD2; a CD47; or a STING agonist, or a combination thereof.

[1039] In some embodiments, the B cell engager is a CD40L, an OX40L, or a CD70 ligand, or an antibody molecule that binds to OX40, CD40 or CD70.

[1040] In some embodiments, the macrophage engager is a CD2 agonist. In some embodiments, the macrophage engager is an antigen binding domain that binds to: CD40L or antigen binding domain or ligand that binds CD40, a Toll like receptor (TLR) agonist (e.g., as described herein), e.g., a TLR9 or TLR4 (e.g., caTLR4 (constitutively active TLR4), CD47, or a STING agonist. In some embodiments, the STING agonist is a cyclic dinucleotide, e.g., cyclic di-GMP (cdGMP) or cyclic di-AMP (cdAMP). In some embodiments, the STING agonist is biotinylated.

[1041] In some embodiments, the dendritic cell engager is a CD2 agonist. In some embodiments, the dendritic cell engager is a ligand, a receptor agonist, or an antibody molecule that binds to one or more of: OX40L, 41BB, a TLR agonist (e.g., as described herein) (e.g., TLR9 agonist, TLR4 (e.g., caTLR4 (constitutively active TLR4)), CD47, or and a STING agonist. In some embodiments, the STING agonist is a cyclic dinucleotide, e.g., cyclic di-GMP (cdGMP) or cyclic di-AMP (cdAMP). In some embodiments, the STING agonist is biotinylated.

[1042] In other embodiments, the immune cell engager mediates binding to, or activation of, one or more of a B cell, a macrophage, and/or a dendritic cell. Exemplary B cell, macrophage, and/or dendritic cell engagers can be chosen from one or more of CD40 ligand (CD40L) or a CD70 ligand; an antibody molecule that binds to CD40 or CD70; an antibody molecule to OX40; an OX40 ligand (OX40L); a Toll-like receptor agonist (e.g., a TLR4, e.g., a constitutively active TLR4 (caTLR4) or a TLR9 agonist); a 41BB agonist; a CD2; a CD47; or a STING agonist, or a combination thereof.

[1043] In some embodiments, the B cell engager is chosen from one or more of a CD40L, an OX40L, or a CD70 ligand, or an antibody molecule that binds to OX40, CD40 or CD70.

[1044] In other embodiments, the macrophage cell engager is chosen from one or more of a CD2 agonist; a CD40L; an OX40L; an antibody molecule that binds to OX40, CD40 or CD70; a Toll-like receptor agonist or a fragment thereof (e.g., a TLR4, e.g., a constitutively active TLR4

[1045] In other embodiments, the dendritic cell engager is chosen from one or more of a CD2 agonist, an OX40 antibody, an OX40L, 41BB agonist, a Toll-like receptor agonist or a fragment thereof (e.g., a TLR4, e.g., a constitutively active TLR4 (caTLR4)), CD47 agonist, or a STING agonist.

[1046] In one embodiment, the OX40L comprises the amino acid sequence: QVSHRYPRIQSIKVQFTEYKKEKGFILTSQKEDEIMKVQNNSVIINCDGFYLISLKGYFSQ EVNISLHYQKDEEPLFQLKKVRSVNSLMVASLTYKDKVYLNVTTDNTSLDDFHVNGGE LILIHQNPGEFCVL (SEQ ID NO: 3456), a fragment thereof, or an amino acid sequence substantially identical thereto (e.g., 95% to 99.9% identical thereto, or having at least one amino acid alteration, but not more than five, ten or fifteen alterations (e.g., substitutions, deletions, or insertions, e.g., conservative substitutions) to the amino acid sequence of SEQ ID NO: 3456.

[1047] In another embodiment, the CD40L comprises the amino acid sequence: MQKGDQNPQIAAHVISEASSKTTSVLQWAEKGYYTMSNNLVTLENGKQLTVKRQGLY YIYAQVTFCSNREASSQAPFIASLCLKSPGRFERILLRAANTHSSAKPCGQQSIHLGGVFE LQPGASVFVNVTDPSQVSHGTGFTSFGLLKL (SEQ ID NO: 3457), a fragment thereof, or an amino acid sequence substantially identical thereto (e.g., 95% to 99.9% identical thereto, or having at least one amino acid alteration, but not more than five, ten or fifteen alterations (e.g., substitutions, deletions, or insertions, e.g., conservative substitutions) to the amino acid sequence of SEQ ID NO: 3457.

[1048] In yet other embodiments, the STING agonist comprises a cyclic dinucleotide, e.g., a cyclic di-GMP (cdGMP), a cyclic di-AMP (cdAMP), or a combination thereof, optionally with 2′,5′ or 3′,5′ phosphate linkages.

[1049] In one embodiment, the immune cell engager includes 41BB ligand, e.g., comprising the amino acid sequence: ACPWAVSGARASPGSAASPRLREGPELSPDDPAGLLDLRQGMFAQLVAQNVLLIDGPLS WYSDPGLAGVSLTGGLSYKEDTKELVVAKAGVYYVFFQLELRRVVAGEGSGSVSLALH LQPLRSAAGAAALALTVDLPPAS SEARNSAFGFQGRLLHL SAGQRLGVHLHTEARARH AWQLTQGATVLGLFRVTPEIPAGLPSPRSE (SEQ ID NO: 3458), a fragment thereof, or an amino acid sequence substantially identical thereto (e.g., 95% to 99.9% identical thereto, or having at least one amino acid alteration, but not more than five, ten or fifteen alterations (e.g., substitutions, deletions, or insertions, e.g., conservative substitutions) to the amino acid sequence of SEQ ID NO: 3458.

### Toll-Like Receptors

[1050] Toll-Like Receptors (TLRs) are evolutionarily conserved receptors are homologues of the Drosophila Toll protein, and recognize highly conserved structural motifs known as pathogen-associated microbial patterns (PAMPs), which are exclusively expressed by microbial pathogens, or danger-associated molecular patterns (DAMPs) that are endogenous molecules released from necrotic or dying cells. PAMPs include various bacterial cell wall components such as lipopolysaccharide (LPS), peptidoglycan (PGN) and lipopeptides, as well as flagellin, bacterial DNA and viral double-stranded RNA. DAMPs include intracellular proteins such as heat shock proteins as well as protein fragments from the extracellular matrix. Stimulation of TLRs by the corresponding PAMPs or DAMPs initiates signaling cascades leading to the activation of transcription factors, such as AP-1, NF-κB and interferon regulatory factors (IRFs). Signaling by TLRs results in a variety of cellular responses, including the production of interferons (IFNs), pro-inflammatory cytokines and effector cytokines that direct the adaptive immune response. TLRs are implicated in a number of inflammatory and immune disorders .

[1051] TLRs are type I transmembrane proteins characterized by an extracellular domain containing leucine-rich repeats (LRRs) and a cytoplasmic tail that contains a conserved region called the Toll/IL-1 receptor (TIR) domain. Ten human and twelve murine TLRs have been characterized, TLR1 to TLR10 in humans, and TLR1 to TLR9, TLR11, TLR12 and TLR13 in mice, the homolog of TLR10 being a pseudogene. TLR2 is essential for the recognition of a variety of PAMPs from Gram-positive bacteria, including bacterial lipoproteins, lipomannans and lipoteichoic acids. TLR3 is implicated in virus-derived double-stranded RNA. TLR4 is predominantly activated by lipopolysaccharide. TLRS detects bacterial flagellin and TLR9 is required for response to unmethylated CpG DNA. Finally, TLR7 and TLR8 recognize small synthetic antiviral molecules, and single-stranded RNA was reported to be their natural ligand. TLR11 has been reported to recognize uropathogenic E.coli and a profilin-like protein from Toxoplasma gondii. The repertoire of specificities of the TLRs is apparently extended by the ability of TLRs to heterodimerize with one another. For example, dimers of TLR2 and TLR6 are required for responses to diacylated lipoproteins while TLR2 and TLR1 interact to recognize triacylated lipoproteins. Specificities of the TLRs are also influenced by various adapter and accessory molecules, such as MD-2 and CD14 that form a complex with TLR4 in response to LPS.

[1052] TLR signaling consists of at least two distinct pathways: a MyD88-dependent pathway that leads to the production of inflammatory cytokines, and a MyD88-independent pathway associated with the stimulation of IFN-β and the maturation of dendritic cells. The MyD88-dependent pathway is common to all TLRs, except TLR3 (Adachi O. et al., 1998. Targeted disruption of the MyD88 gene results in loss of IL-1- and IL-18-mediated function. Immunity. 9(1):143-50). Upon activation by PAMPs or DAMPs, TLRs hetero- or homodimerize inducing the recruitment of adaptor proteins via the cytoplasmic TIR domain. Individual TLRs induce different signaling responses by usage of the different adaptor molecules. TLR4 and TLR2 signaling requires the adaptor TIRAP/Mal, which is involved in the MyD88-dependent pathway. TLR3 triggers the production of IFN-β in response to double-stranded RNA, in a MyD88-independent manner, through the adaptor TRIF/TICAM-1. TRAM/TICAM-2 is another adaptor molecule involved in the MyD88-independent pathway which function is restricted to the TLR4 pathway.

[1053] TLR3, TLR7, TLR8 and TLR9 recognize viral nucleic acids and induce type I IFNs. The signaling mechanisms leading to the induction of type I IFNs differ depending on the TLR activated. They involve the interferon regulatory factors, IRFs, a family of transcription factors known to play a critical role in antiviral defense, cell growth and immune regulation. Three IRFs (IRF3, IRF5 and IRF7) function as direct transducers of virus-mediated TLR signaling. TLR3 and TLR4 activate IRF3 and IRF7, while TLR7 and TLR8 activate IRF5 and IRF7 (Doyle S. et al., 2002. IRF3 mediates a TLR3/TLR4-specific antiviral gene program. Immunity. 17(3):251-63). Furthermore, type I IFN production stimulated by TLR9 ligand CpG-A has been shown to be mediated by PI(3)K and mTOR (Costa-Mattioli M. & Sonenberg N. 2008. RAPping production of type I interferon in pDCs through mTOR. Nature Immunol. 9: 1097-1099).

[1054] TLR-9

[1055] TLR9 recognizes unmethylated CpG sequences in DNA molecules. CpG sites are relatively rare (-1%) on vertebrate genomes in comparison to bacterial genomes or viral DNA. TLR9 is expressed by numerous cells of the immune system such as B lymphocytes, monocytes, natural killer (NK) cells, and plasmacytoid dendritic cells. TLR9 is expressed intracellularly, within the endosomal compartments and functions to alert the immune system of viral and bacterial infections by binding to DNA rich in CpG motifs. TLR9 signals leads to activation of the cells initiating pro-inflammatory reactions that result in the production of cytokines such as type-I interferon and IL-12.

[1056] TLR Agonists

[1057] A TLR agonist can agonize one or more TLR, e.g., one or more of human TLR- 1, 2, 3, 4, 5, 6, 7, 8, 9, or 10. In some embodiments, an adjunctive agent described herein is a TLR agonist. In some embodiments, the TLR agonist specifically agonizes human TLR-9. In some embodiments, the TLR-9 agonist is a CpG moiety. As used herein, a CpG moiety, is a linear dinucleotide having the sequence: 5′-C-phosphate-G-3′, that is, cytosine and guanine separated by only one phosphate.

[1058] In some embodiments, the CpG moiety comprises at least 1, 2, 3, 4, 5, 6, 7, 8, 9, 10, 11, 12, 13, 14, 15, 16, 17, 18, 19, 20, 21, 22, 23, 24, 25, 26, 27, 28, 29, 30, or more CpG dinucleotides. In some embodiments, the CpG moiety consists of 1, 2, 3, 4, 5, 6, 7, 8, 9, 10, 11, 12, 13, 14, 15, 16, 17, 18, 19, 20, 21, 22, 23, 24, 25, 26, 27, 28, 29, or 30 CpG dinucleotides. In some embodiments, the CpG moiety has 1-5, 1-10, 1-20, 1-30, 1-40, 1-50, 5-10, 5-20, 5-30, 10-20, 10-30, 10-40, or 10-50 CpG dinucleotides.

[1059] In some embodiments, the TLR-9 agonist is a synthetic ODN (oligodeoxynucleotides). CpG ODNs are short synthetic single-stranded DNA molecules containing unmethylated CpG dinucleotides in particular sequence contexts (CpG motifs). CpG ODNs possess a partially or completely phosphorothioated (PS) backbone, as opposed to the natural phosphodiester (PO) backbone found in genomic bacterial DNA. There are three major classes of CpG ODNs: classes A, B and C, which differ in their immunostimulatory activities. CpG-A ODNs are characterized by a PO central CpG-containing palindromic motif and a PS-modified 3′ poly-G string. They induce high IFN-α production from pDCs but are weak stimulators of TLR9-dependent NF-κB signaling and pro-inflammatory cytokine (e.g. IL-6) production. CpG-B ODNs contain a full PS backbone with one or more CpG dinucleotides. They strongly activate B cells and TLR9-dependent NF-κB signaling but weakly stimulate IFN-a secretion. CpG-C ODNs combine features of both classes A and B. They contain a complete PS backbone and a CpG-containing palindromic motif. C-Class CpG ODNs induce strong IFN-a production from pDC as well as B cell stimulation.

### Infectious Disease-Targeting Moieties

[1060] The present disclosure provides, inter alfa, multispecific (e.g., bi-, tri-, tetra- specific) molecules, that include, e.g., are engineered to contain, one or more infectious disease-targeting moieties that direct the molecule to an infectious agent, or a portion thereof, e.g., as described herein.

[1061] In certain embodiments, the multispecific molecules disclosed herein include an infectious disease-targeting moiety. The infectious disease-targeting moiety can be chosen from an antibody molecule (e.g., an antigen binding domain as described herein), a receptor or a receptor fragment, or a ligand or a ligand fragment, or a combination thereof. In some embodiments, the infectious disease-targeting moiety associates with, e.g., binds to, an infectious agent or a portion thereof (e.g., a molecule, e.g., antigen, present on, derived from, or comprised in the infectious agent). In certain embodiments, the infectious disease-targeting moiety targets, e.g., directs the multispecific molecules disclosed herein to an infectious agent or portion thereof, e.g., as described herein.

### Stromal Modifying Moieties

[1062] Stromal modifying moieties described herein include moieties (e.g., proteins, e.g., enzymes) capable of degrading a component of the stroma, e.g., an ECM component, e.g., a glycosaminoglycan, e.g., hyaluronan (also known as hyaluronic acid or HA), chondroitin sulfate, chondroitin, dermatan sulfate, heparin sulfate, heparin, entactin, tenascin, aggrecan and keratin sulfate; or an extracellular protein, e.g., collagen, laminin, elastin, fibrinogen, fibronectin, and vitronectin.

### Stromal Modifying Enzymes

[1063] In some embodiments, the stromal modifying moiety is an enzyme. For example, the stromal modifying moiety can include, but is not limited to a hyaluronidase, a collagenase, a chondroitinase, a matrix metalloproteinase (e.g., macrophage metalloelastase).

[1064] Hyaluronidases

[1065] Hyaluronidases are a group of neutral- and acid-active enzymes found throughout the animal kingdom. Hyaluronidases vary with respect to substrate specificity, and mechanism of action. There are three general classes of hyaluronidases: (1) Mammalian-type hyaluronidases, (EC 3.2.1.35) which are endo-beta-N-acetylhexosaminidases with tetrasaccharides and hexasaccharides as the major end products. They have both hydrolytic and transglycosidase activities, and can degrade hyaluronan and chondroitin sulfates; (2) Bacterial hyaluronidases (EC 4.2.99.1) degrade hyaluronan and, and to various extents, chondroitin sulfate and dermatan sulfate. They are endo-beta-N-acetylhexosaminidases that operate by a beta elimination reaction that yields primarily disaccharide end products; (3) Hyaluronidases (EC 3.2.1.36) from leeches, other parasites, and crustaceans are endo-beta-glucuronidases that generate tetrasaccharide and hexasaccharide end products through hydrolysis of the beta 1-3 linkage.

[1066] Mammalian hyaluronidases can be further divided into two groups: (1) neutral active and (2) acid active enzymes. There are six hyaluronidase-like genes in the human genome, HYAL1, HYAL2, HYAL3 HYAL4 HYALP1 and PH20/SPAM1. HYALP1 is a pseudogene, and HYAL3 has not been shown to possess enzyme activity toward any known substrates. HYAL4 is a chondroitinase and lacks activity towards hyaluronan. HYAL1 is the prototypical acid-active enzyme and PH20 is the prototypical neutral-active enzyme. Acid active hyaluronidases, such as HYAL1 and HYAL2 lack catalytic activity at neutral pH. For example, HYAL1 has no catalytic activity in vitro over pH 4.5 (Frost and Stern, “A Microtiter-Based Assay for Hyaluronidase Activity Not Requiring Specialized Reagents”, Analytical Biochemistry, vol. 251, pp. 263-269 (1997). HYAL2 is an acid active enzyme with a very low specific activity in vitro.

[1067] In some embodiments the hyaluronidase is a mammalian hyaluronidase. In some embodiments the hyaluronidase is a recombinant human hyaluronidase. In some embodiments, the hyaluronidase is a neutral active hyaluronidase. In some embodiments, the hyaluronidase is a neutral active soluble hyaluronidase. In some embodiments, the hyaluronidase is a recombinant PH20 neutral-active enzyme. In some embodiments, the hyaluronidase is a recombinant PH20 neutral-active soluble enzyme. In some embodiments the hyaluronidase is glycosylated. In some embodiments, the hyaluronidase possesses at least one N-linked glycan. A recombinant hyaluronidase can be produced using conventional methods known to those of skill in the art, e.g., U.S. Pat. No. 7,767,429, the entire contents of which are incorporated by reference herein.

[1068] In some embodiments the hyaluronidase is rHuPH20 (also referred to as Hylenex®; presently manufactured by Halozyme; approved by the FDA in 2005 (see e.g., Scodeller P (2014) Hyaluronidase and other Extracellular Matrix Degrading Enzymes for Cancer Therapy: New Uses and Nano- Formulations. J Carcinog Mutage 5:178; U.S. Pat. Nos. 7,767,429; 8,202,517; 7,431,380; 8,450,470; 8,772,246; 8,580,252, the entire contents of each of which is incorporated by reference herein). rHuPH20 is produced by genetically engineered CHO cells containing a DNA plasmid encoding for a soluble fragment of human hyaluronidase PH20. In some embodiments the hyaluronidase is glycosylated. In some embodiments, the hyaluronidase possesses at least one N-linked glycan. A recombinant hyaluronidase can be produced using conventional methods known to those of skill in the art, e.g., U.S. Pat. No. 7,767,429, the entire contents of which are incorporated by reference herein. In some embodiments, rHuPH20 has a sequence at least 95% (e.g., at least 96%, 97%, 98%, 99%, 100%) identical to the amino acid sequence of

(SEQ ID NO: 3459)
LNFRAPPVIPNVPFLWAWNAPSEFCLGKFDEPLDMSLFSFIGSPRINATGQ
GVTIFYVDRLGYYPYIDSITGVTVNGGIPQKISLQDHLDKAKKDITFYMPV
DNLGMAVIDWEEWRPTWARNWKPKDVYKNRSIELVQQQNVQLSLTEATEKA
KQEFEKAGKDFLVETIKLGKLLRPNHLWGYYLFPDCYNHHYKKPGYNGSCF
NVEIKRNDDLSWLWNESTALYPSIYLNTQQSPVAATLYVRNRVREAIRVSK
IPDAKSPLPVFAYTRIVFTDQVLKFLSQDELVYTFGETVALGASGIVIWGT
LSIMRSMKSCLLLDNYMETILNPYIINVTLAAKMCSQVLCQEQGVCIRKNW
NSSDYLHLNPDNFAIQLEKGGKFTVRGKPTLEDLEQFSEKFYCSCYSTLSC
KEKADVKDTDAVDVCIADGVCIDAFLKPPMETEEPQIFYNASPSTLS.

[1069] In any of the methods provided herein, the anti-hyaluronan agent can be an agent that degrades hyaluronan or can be an agent that inhibits the synthesis of hyaluronan. For example, the anti-hyaluronan agent can be a hyaluronan degrading enzyme. In another example, the anti-hyaluronan agent or is an agent that inhibits hyaluronan synthesis. For example, the anti-hyaluronan agent is an agent that inhibits hyaluronan synthesis such as a sense or antisense nucleic acid molecule against an HA synthase or is a small molecule drug. For example, an anti-hyaluronan agent is 4-methylumbelliferone (MU) or a derivative thereof, or leflunomide or a derivative thereof. Such derivatives include, for example, a derivative of 4-methylumbelliferone (MU) that is 6,7-dihydroxy-4-methyl coumarin or 5,7-dihydroxy-4-methyl coumarin.

[1070] In further examples of the methods provided herein, the hyaluronan degrading enzyme is a hyaluronidase. In some examples, the hyaluronan-degrading enzyme is a PH20 hyaluronidase or truncated form thereof to lacking a C-terminal glycosylphosphatidylinositol (GPI) attachment site or a portion of the GPI attachment site. In specific examples, the hyaluronidase is a PH20 selected from a human, monkey, bovine, ovine, rat, mouse or guinea pig PH20. For example, the hyaluronan- degrading enzyme is a human PH20 hyaluronidase that is neutral active and N- glycosylated and is selected from among (a) a hyaluronidase polypeptide that is a full- length PH20 or is a C-terminal truncated form of the PH20, wherein the truncated form includes at least amino acid residues 36-464 of SEQ ID NO: 3459, such as 36-481 , 36-482, 36-483, where the full-length PH20 has the sequence of amino acids set forth in SEQ ID NO: 3459; or (b) a hyaluronidase polypeptide comprising a sequence of amino acids having at least 85%, 86%, 87%, 88%, 89%, 90%, 91%, 92%, 93%, 94%, 95%, 96%, 97%, 98%, 99% or more sequence identity with the polypeptide or truncated form of sequence of amino acids set forth in SEQ ID NO: 3459; or (c) a hyaluronidase polypeptide of (a) or (b) comprising amino acid substitutions, whereby the hyaluronidase polypeptide has a sequence of amino acids having at least 85%, 86 %, 87 %, 88 %, 89 %, 90 %, 91 %, 92 %, 93 %, 94 %, 95 %, 96 %, 97 %, 98%, 99% or more sequence identity with the polypeptide set forth in SEQ ID NO: 3459or the with the corresponding truncated forms thereof. In exemplary examples, the hyaluronan- degrading enzyme is a PH20 that comprises a composition designated rHuPH20.

[1071] In other examples, the anti-hyaluronan agent is a hyaluronan degrading enzyme that is modified by conjugation to a polymer. The polymer can be a PEG and the anti-hyaluronan agent a PEGylated hyaluronan degrading enzyme. Hence, in some examples of the methods provided herein the hyaluronan-degrading enzyme is modified by conjugation to a polymer. For example, the hyaluronan-degrading enzyme is conjugated to a PEG, thus the hyaluronan degrading enzyme is PEGylated. In an exemplary example, the hyaluronan-degrading enzyme is a PEGylated PH20 enzyme (PEGPH20). In the methods provided herein, the corticosteroid can be a glucocorticoid that is selected from among cortisones, dexamethasones, hydrocortisones, methylprednisolones, prednisolones and prednisones.

[1072] Chondroitinases

[1073] Chondroitinases are enzymes found throughout the animal kingdom which degrade glycosaminoglycans, specifically chondroitins and chondroitin sulfates, through an endoglycosidase reaction. In some embodiments the chondroitinase is a mammalian chondroitinase. In some embodiments the chondroitinase is a recombinant human chondroitinase. In some embodiments the chondroitinase is HYAL4. Other exemplary chondroitinases include chondroitinase ABC (derived from Proteus vulgaris; Japanese Patent Application Laid-open No 6-153947, T. Yamagata et al. J. Biol. Chem., 243, 1523 (1968), S. Suzuki et al, J. Biol. Chem., 243, 1543 (1968)), chondroitinase AC (derived from Flavobacterium heparinum; T. Yamagata et al., J. Biol. Chem., 243, 1523 (1968)), chondroitinase AC II (derived from Arthrobacter aurescens; K. Hiyama, and S. Okada, J. Biol. Chem., 250, 1824 (1975), K. Hiyama and S. Okada, J. Biochem. (Tokyo), 80, 1201 (1976)), Hyaluronidase ACIII (derived from Flavobacterium sp. Hp102; Hirofumi Miyazono et al., Seikagaku, 61, 1023 (1989)), chondroitinase B (derived from Flavobacterium heparinum; Y. M. Michelacci and C. P. Dietrich, Biochem. Biophys. Res. Commun., 56, 973 (1974), Y. M. Michelacci and C. P. Dietrich, Biochem. J., 151, 121 (1975), Kenichi Maeyama et al, Seikagaku, 57, 1189 (1985)), chondroitinase C (derived from Flavobacterium sp. Hp102; Hirofumi Miyazono et al, Seikagaku, 61, 1023 (1939)), and the like.

[1074] Matrix Metalloproteinases

[1075] Matrix metalloproteases (MMPs) are zinc-dependent endopeptidases that are the major proteases involved in extracellular matrix (ECM) degradation. MMPs are capable of degrading a wide range of extracellular molecules and a number of bioactive molecules. Twenty-four MMP genes have been identified in humans, which can be organized into six groups based on domain organization and substrate preference: Collagenases (MMP-1,-8 and -13), Gelatinases (MMP-2 and MMP-9), Stromelysins (MMP-3,-10 and -11), Matrilysin (MMP-7 and MMP-26), Membrane-type (MT)-MMPs (MMP-14,-15,-16,-17,-24 and -25) and others (MMP-12,-19,-20,-21,-23,-27 and -28). In some embodiments, the stromal modifying moiety is a human recombinant MMP (e.g., MMP-1,-2,-3,-4,-5,-6,-7,-8,-9, 10,-11,-12,-13,-14, 15,-15,-17, -18,-19, 20,-21,-22,-23, or -24).

[1076] Collagenases

[1077] The three mammalian collagenases (MMP-1,-8, and -13) are the principal secreted endopeptidases capable of cleaving collagenous extracellular matrix. In addition to fibrillar collagens, collagenases can cleave several other matrix and non-matrix proteins including growth factors. Collagenases are synthesized as inactive pro-forms, and once activated, their activity is inhibited by specific tissue inhibitors of metalloproteinases, TIMPs, as well as by non-specific proteinase inhibitors (Ala-aho R et al. Biochimie. Collagenases in cancer. 2005 March-April; 87(3-4):273-86). In some embodiments, the stromal modifying moiety is a collagenase. In some embodiments, the collagenase is a human recombinant collagenase. In some embodiments, the collagenase is MMP-1. In some embodiments, the collagenase is MMP-8. In some embodiments, the collagenase is MMP-13.

[1078] Macrophage Metalloelastase

[1079] Macrophage metalloelastase (MME), also known as MMP-12, is a member of the stromelysin subgroup of MMPs and catalyzes the hydrolysis of soluble and insoluble elastin and a broad selection of matrix and nonmatrix substrates including type IV collagen, fibronectin, laminin, vitronectin, entactin, heparan, and chondroitin sulfates (Erj a Kerkela et al. Journal of Investigative Dermatology (2000) 114, 1113-1119; doi:10.1046/j.1523-1747.2000.00993). In some embodiments, the stromal modifying moiety is a MME. In some embodiments, the MME is a human recombinant MME. In some embodiments, the MME is MMP-12.

### Additional Stromal Modifying Moieties

[1080] In some embodiments, the stromal modifying moiety decreases the level or production of a stromal or extracellular matrix (ECM) component.

[1081] In some embodiments, the stromal or ECM component decreased is chosen from a glycosaminoglycan or an extracellular protein, or a combination thereof. In some embodiments, the glycosaminoglycan is chosen from hyaluronan (also known as hyaluronic acid or HA), chondroitin sulfate, chondroitin, dermatan sulfate, heparin, heparin sulfate, entactin, tenascin, aggrecan and keratin sulfate. In some embodiments, the extracellular protein is chosen from collagen, laminin, elastin, fibrinogen, fibronectin, or vitronectin. In some embodiments, the stromal modifying moiety includes an enzyme molecule that degrades a stroma or extracellular matrix (ECM). In some embodiments, the enzyme molecule is chosen from a hyaluronidase molecule, a collagenase molecule, a chondroitinase molecule, a matrix metalloproteinase molecule (e.g., macrophage metalloelastase), or a variant (e.g., a fragment) of any of the aforesaid. The term “enzyme molecule” includes a full length, a fragment or a variant of the enzyme, e.g., an enzyme variant that retains at least one functional property of the naturally-occurring enzyme.

[1082] In some embodiments, the stromal modifying moiety decreases the level or production of hyaluronic acid. In other embodiments, the stromal modifying moiety comprises a hyaluronan degrading enzyme, an agent that inhibits hyaluronan synthesis, or an antibody molecule against hyaluronic acid.

[1083] In some embodiments, the hyaluronan degrading enzyme is a hyaluronidase molecule, e.g., a full length or a variant (e.g., fragment thereof) thereof. In some embodiments, the hyaluronan degrading enzyme is active in neutral or acidic pH, e.g., pH of about 4-5. In some embodiments, the hyaluronidase molecule is a mammalian hyaluronidase molecule, e.g., a recombinant human hyaluronidase molecule, e.g., a full length or a variant (e.g., fragment thereof, e.g., a truncated form) thereof. In some embodiments, the hyaluronidase molecule is chosen from HYAL1, HYAL2, or PH-20/SPAM1, or a variant thereof (e.g., a truncated form thereof). In some embodiments, the truncated form lacks a C-terminal glycosylphosphatidylinositol (GPI) attachment site or a portion of the GPI attachment site. In some embodiments, the hyaluronidase molecule is glycosylated, e.g., comprises at least one N-linked glycan.

[1084] In some embodiments, the hyaluronidase molecule comprises the amino acid sequence: LNFRAPPVIPNVPFLWAWNAPSEFCLGKFDEPLDMSLFSFIGSPRINATGQGVTIFYVDRL GYYPYID SITGVTVNGGIPQKISLQDHLDKAKKDITFYMPVDNLGMAVIDWEEWRPTW ARNWKPKDVYKNRSIELVQQQNVQLSLTEATEKAKQEFEKAGKDFLVETIKLGKLLRP NHLWGYYLFPDCYNHHYKKPGYNGSCFNVEIKRNDDLSWLWNESTALYPSIYLNTQQS PVAATLYVRNRVREAIRVSKIPDAKSPLPVFAYTRIVFTDQVLKFLSQDELVYTFGETVA LGASGIVIWGTLSIMRSMKSCLLLDNYMETILNPYIINVTLAAKMCSQVLCQEQGVCIRK NWNSSDYLHLNPDNFAIQLEKGGKFTVRGKPTLEDLEQFSEKFYCSCYSTLSCKEKADV KDTDAVDVCIADGVCIDAFLKPPMETEEPQIFYNASPSTLS (SEQ ID NO: 3464), or a fragment thereof, or an amino acid sequence substantially identical thereto (e.g., 95% to 99.9% identical thereto, or having at least one amino acid alteration, but not more than five, ten or fifteen alterations (e.g., substitutions, deletions, or insertions, e.g., conservative substitutions) to the amino acid sequence of SEQ ID NO: 3464.

[1085] In some embodiments, the hyaluronidase molecule comprises:
[1086] (i) the amino acid sequence of 36-464 of SEQ ID NO: 3464;
[1087] (ii) the amino acid sequence of 36-481, 36-482, or 36-483 of PH20, wherein PH20 has the sequence of amino acids set forth in SEQ ID NO: 3464; or
[1088] (iii) an amino acid sequence having at least 95% to 100% sequence identity to the polypeptide or truncated form of sequence of amino acids set forth in SEQ ID NO: 3464; or
[1089] (iv) an amino acid sequence having 30, 20, 10, 5 or fewer amino acid substitutions to the amino acid sequence set forth in SEQ ID NO: 3464. In some embodiments, the hyaluronidase molecule comprises an amino acid sequence at least 95% (e.g., at least 95%, 96%, 97%, 98%, 99%, 100%) identical to the amino acid sequence of SEQ ID NO: 3464. In some embodiments, the hyaluronidase molecule is encoded by a nucleotide sequence at least 95% (e.g., at least 96%, 97%, 98%, 99%, 100%) identical to the nucleotide sequence of SEQ ID NO: 3464.

[1090] In some embodiments, the hyaluronidase molecule is PH20, e.g., rHuPH20. In some embodiments, the hyaluronidase molecule is HYAL1 and comprises the amino acid sequence: FRGPLLPNRPF TTVWNANTQWCLERHGVDVDVSVFDVVANPGQTFRGPDMTIFYS SQG TYPYYTPTGEPVFGGLPQNASLIAHLARTFQDILAAIPAPDF SGLAVIDWEAWRPRWAFN WDTKDIYRQRSRALVQAQHPDWPAPQVEAVAQDQFQGAARAWMAGTLQLGRALRPR GLWGFYGFPDCYNYDFLSPNYTGQCPSGIRAQNDQLGWLWGQSRALYPSIYMPAVLEG TGKSQMYVQHRVAEAFRVAVAAGDPNLPVLPYVQIFYDTTNHFLPLDELEHSLGESAA QGAAGVVLWVSWENTRTKESCQAIKEYMDTTLGPFILNVTSGALLCSQALCSGHGRCV RRTSHPKALLLLNPASFSIQLTPGGGPLSLRGALSLEDQAQMAVEFKCRCYPGWQAPWC ERKSMW (SEQ ID NO: 3465), or a fragment thereof, or an amino acid sequence substantially identical thereto (e.g., 95% to 99.9% identical thereto, or having at least one amino acid alteration, but not more than five, ten or fifteen alterations (e.g., substitutions, deletions, or insertions, e.g., conservative substitutions) to the amino acid sequence of SEQ ID NO: 3465.

[1091] In some embodiments, the hyaluronan degrading enzyme, e.g., the hyaluronidase molecule, further comprises a polymer, e.g., is conjugated to a polymer, e.g., PEG. In some embodiments, the hyaluronan-degrading enzyme is a PEGylated PH20 enzyme (PEGPH20). In some embodiments, the hyaluronan degrading enzyme, e.g., the hyaluronidase molecule, further comprises an immunoglobulin chain constant region (e.g., Fc region) chosen from, e.g., the heavy chain constant regions of IgG1, IgG2, IgG3, and IgG4, more particularly, the heavy chain constant region of human IgG1, IgG2, IgG3, or IgG4. In some embodiments, the immunoglobulin constant region (e.g., the Fc region) is linked, e.g., covalently linked to, the hyaluronan degrading enzyme, e.g., the hyaluronidase molecule. In some embodiments, the immunoglobulin chain constant region (e.g., Fc region) is altered, e.g., mutated, to increase or decrease one or more of: Fc receptor binding, antibody glycosylation, the number of cysteine residues, effector cell function, or complement function. In some embodiments, the hyaluronan degrading enzyme, e.g., the hyaluronidase molecule forms a dimer.

[1092] In some embodiments, the stromal modifying moiety comprises an inhibitor of the synthesis of hyaluronan, e.g., an HA synthase. In some embodiments, the inhibitor comprises a sense or an antisense nucleic acid molecule against an HA synthase or is a small molecule drug. In some embodiments, the inhibitor is 4-methylumbelliferone (MU) or a derivative thereof (e.g., 6,7-dihydroxy-4-methyl coumarin or 5,7-dihydroxy-4-methyl coumarin), or leflunomide or a derivative thereof.

[1093] In some embodiments, the stromal modifying moiety comprises antibody molecule against hyaluronic acid.

[1094] In some embodiments, the stromal modifying moiety comprises a collagenase molecule, e.g., a mammalian collagenase molecule, or a variant (e.g., fragment) thereof. In some embodiments, the collagenase molecule is collagenase molecule IV, e.g., comprising the amino acid sequence of: YNFFPRKPKWDKNQITYRIIGYTPDLDPETVDDAFARAFQVWSDVTPLRFSRIHDGEADI MINFGRWEHGDGYPFDGKDGLLAHAFAPGTGVGGDSHFDDDELWTLGEGQVVRVKY GNADGEYCKFPFLFNGKEYNSCTDTGRSDGFLWCSTTYNFEKDGKYGFCPHEALFTMG GNAEGQPCKFPFRFQGTSYDSCTTEGRTDGYRWCGTTEDYDRDKKYGFCPETAMSTVG GNSEGAPCVFPFTFLGNKYESCTSAGRSDGKMWCATTANYDDDRKWGFCPDQGYSLF LVAAHEFGHAMGLEHSQDPGALMAPIYTYTKNFRLSQDDIKGIQELYGASPDIDLGTGP TPTLGPVTPEICKQDIVFDGIAQIRGEIFFFKDRFIWRTVTPRDKPMGPLLVATFWPELPEK IDAVYEAPQEEKAVFFAGNEYWIYSASTLERGYPKPLTSLGLPPDVQRVDAAFNWSKNK KTYIFAGDKFWRYNEVKKKMDPGFPKLIADAWNAIPDNLDAVVDLQGGGHSYFFKGA YYLKLENQSLKSVKFGSIKSDWLGC (SEQ ID NO: 3466), or a fragment thereof, or an amino acid sequence substantially identical thereto (e.g., 95% to 99.9% identical thereto, or having at least one amino acid alteration, but not more than five, ten or fifteen alterations (e.g., substitutions, deletions, or insertions, e.g., conservative substitutions) to the amino acid sequence of SEQ ID NO: 3466.

### Linkers

[1095] The multispecific or multifunctional molecule disclosed herein can further include a linker, e.g., a linker between one or more of: the antigen binding domain and the cytokine molecule, the antigen binding domain and the immune cell engager, the antigen binding domain and the stromal modifying moiety, the cytokine molecule and the immune cell engager, the cytokine molecule and the stromal modifying moiety, the immune cell engager and the stromal modifying moiety, the antigen binding domain and the immunoglobulin chain constant region, the cytokine molecule and the immunoglobulin chain constant region, the immune cell engager and the immunoglobulin chain constant region, or the stromal modifying moiety and the immunoglobulin chain constant region. In embodiments, the linker is chosen from: a cleavable linker, a non-cleavable linker, a peptide linker, a flexible linker, a rigid linker, a helical linker, or a non-helical linker, or a combination thereof.

[1096] In one embodiment, the multispecific molecule can include one, two, three or four linkers, e.g., a peptide linker. In one embodiment, the peptide linker includes Gly and Ser. In some embodiments, the peptide linker is selected from GGGGS (SEQ ID NO: 3460); GGGGSGGGGS (SEQ ID NO: 3461); GGGGSGGGGSGGGGS (SEQ ID NO: 3462); and DVPSGPGGGGGSGGGGS (SEQ ID NO: 3463). In some embodiments, the peptide linker is a A(EAAAK)nA (SEQ ID NO: 3477) family of linkers (e.g., as described in Protein Eng. (2001) 14 (8): 529-532). These are stiff helical linkers with n ranging from 2-5. In some embodiments, the peptide linker is selected from AEAAAKEAAAKAAA (SEQ ID NO: 3467); AEAAAKEAAAKEAAAKAAA (SEQ ID NO: 3468); AEAAAKEAAAKEAAAKEAAAKAAA (SEQ ID NO: 3469); and AEAAAKEAAAKEAAAKEAAAKEAAAKAAA(SEQ ID NO: 3470).

### Nucleic Acids

[1097] Nucleic acids encoding the aforementioned antibody molecules, e.g., anti-TCRβV antibody molecules, multispecific or multifunctional molecules are also disclosed.

[1098] In certain embodiments, the invention features nucleic acids comprising nucleotide sequences that encode heavy and light chain variable regions and CDRs or hypervariable loops of the antibody molecules, as described herein. For example, the invention features a first and second nucleic acid encoding heavy and light chain variable regions, respectively, of an antibody molecule chosen from one or more of the antibody molecules disclosed herein. The nucleic acid can comprise a nucleotide sequence as set forth in the tables herein, or a sequence substantially identical thereto (e.g., a sequence at least about 85%, 90%, 95%, 99% or more identical thereto, or which differs by no more than 3, 6, 15, 30, or 45 nucleotides from the sequences shown in the tables herein.

[1099] In certain embodiments, the nucleic acid can comprise a nucleotide sequence encoding at least one, two, or three CDRs or hypervariable loops from a heavy chain variable region having an amino acid sequence as set forth in the tables herein, or a sequence substantially homologous thereto (e.g., a sequence at least about 85%, 90%, 95%, 99% or more identical thereto, and/or having one or more substitutions, e.g., conserved substitutions). In other embodiments, the nucleic acid can comprise a nucleotide sequence encoding at least one, two, or three CDRs or hypervariable loops from a light chain variable region having an amino acid sequence as set forth in the tables herein, or a sequence substantially homologous thereto (e.g., a sequence at least about 85%, 90%, 95%, 99% or more identical thereto, and/or having one or more substitutions, e.g., conserved substitutions). In yet another embodiment, the nucleic acid can comprise a nucleotide sequence encoding at least one, two, three, four, five, or six CDRs or hypervariable loops from heavy and light chain variable regions having an amino acid sequence as set forth in the tables herein, or a sequence substantially homologous thereto (e.g., a sequence at least about 85%, 90%, 95%, 99% or more identical thereto, and/or having one or more substitutions, e.g., conserved substitutions).

[1100] In certain embodiments, the nucleic acid can comprise a nucleotide sequence encoding at least one, two, or three CDRs or hypervariable loops from a heavy chain variable region having the nucleotide sequence as set forth in the tables herein, a sequence substantially homologous thereto (e.g., a sequence at least about 85%, 90%, 95%, 99% or more identical thereto, and/or capable of hybridizing under the stringency conditions described herein). In another embodiment, the nucleic acid can comprise a nucleotide sequence encoding at least one, two, or three CDRs or hypervariable loops from a light chain variable region having the nucleotide sequence as set forth in the tables herein, or a sequence substantially homologous thereto (e.g., a sequence at least about 85%, 90%, 95%, 99% or more identical thereto, and/or capable of hybridizing under the stringency conditions described herein). In yet another embodiment, the nucleic acid can comprise a nucleotide sequence encoding at least one, two, three, four, five, or six CDRs or hypervariable loops from heavy and light chain variable regions having the nucleotide sequence as set forth in the tables herein, or a sequence substantially homologous thereto (e.g., a sequence at least about 85%, 90%, 95%, 99% or more identical thereto, and/or capable of hybridizing under the stringency conditions described herein).

[1101] In certain embodiments, the nucleic acid can comprise a nucleotide sequence encoding a cytokine molecule, an immune cell engager, or a stromal modifying moiety disclosed herein.

[1102] In another aspect, the application features host cells and vectors containing the nucleic acids described herein. The nucleic acids may be present in a single vector or separate vectors present in the same host cell or separate host cell, as described in more detail hereinbelow.

### Vectors

[1103] Further provided herein are vectors comprising the nucleotide sequences encoding antibody molecules, e.g., anti-TCRβV antibody molecules, or a multispecific or multifunctional molecule described herein. In one embodiment, the vectors comprise nucleic acid sequences encoding antibody molecules, e.g., anti-TCRβV antibody molecules, or multispecific or multifunctional molecule described herein. In one embodiment, the vectors comprise the nucleotide sequences described herein. The vectors include, but are not limited to, a virus, plasmid, cosmid, lambda phage or a yeast artificial chromosome (YAC).

[1104] Numerous vector systems can be employed. For example, one class of vectors utilizes DNA elements which are derived from animal viruses such as, for example, bovine papilloma virus, polyoma virus, adenovirus, vaccinia virus, baculovirus, retroviruses (Rous Sarcoma Virus, MMTV or MOMLV) or SV40 virus. Another class of vectors utilizes RNA elements derived from RNA viruses such as Semliki Forest virus, Eastern Equine Encephalitis virus and Flaviviruses.

[1105] Additionally, cells which have stably integrated the DNA into their chromosomes may be selected by introducing one or more markers which allow for the selection of transfected host cells. The marker may provide, for example, prototropy to an auxotrophic host, biocide resistance (e.g., antibiotics), or resistance to heavy metals such as copper, or the like. The selectable marker gene can be either directly linked to the DNA sequences to be expressed, or introduced into the same cell by cotransformation. Additional elements may also be needed for optimal synthesis of mRNA. These elements may include splice signals, as well as transcriptional promoters, enhancers, and termination signals.

[1106] Once the expression vector or DNA sequence containing the constructs has been prepared for expression, the expression vectors may be transfected or introduced into an appropriate host cell. Various techniques may be employed to achieve this, such as, for example, protoplast fusion, calcium phosphate precipitation, electroporation, retroviral transduction, viral transfection, gene gun, lipid based transfection or other conventional techniques. In the case of protoplast fusion, the cells are grown in media and screened for the appropriate activity.

[1107] Methods and conditions for culturing the resulting transfected cells and for recovering the antibody molecule produced are known to those skilled in the art, and may be varied or optimized depending upon the specific expression vector and mammalian host cell employed, based upon the present description.

### Cells

[1108] In another aspect, the application features host cells and vectors containing the nucleic acids described herein. The nucleic acids may be present in a single vector or separate vectors present in the same host cell or separate host cell. The host cell can be a eukaryotic cell, e.g., a mammalian cell, an insect cell, a yeast cell, or a prokaryotic cell, e.g., E. coli. For example, the mammalian cell can be a cultured cell or a cell line. Exemplary mammalian cells include lymphocytic cell lines (e.g., NSO), Chinese hamster ovary cells (CHO), COS cells, oocyte cells, and cells from a transgenic animal, e.g., mammary epithelial cell.

[1109] The invention also provides host cells comprising a nucleic acid encoding an antibody molecule as described herein.

[1110] In one embodiment, the host cells are genetically engineered to comprise nucleic acids encoding the antibody molecule.

[1111] In one embodiment, the host cells are genetically engineered by using an expression cassette. The phrase “expression cassette,” refers to nucleotide sequences, which are capable of affecting expression of a gene in hosts compatible with such sequences. Such cassettes may include a promoter, an open reading frame with or without introns, and a termination signal. Additional factors necessary or helpful in effecting expression may also be used, such as, for example, an inducible promoter.

[1112] The invention also provides host cells comprising the vectors described herein.

[1113] The cell can be, but is not limited to, a eukaryotic cell, a bacterial cell, an insect cell, or a human cell. Suitable eukaryotic cells include, but are not limited to, Vero cells, HeLa cells, COS cells, CHO cells, HEK293 cells, BHK cells and MDCKII cells. Suitable insect cells include, but are not limited to, Sf9 cells.

Method of Expanding Cells with Anti-TCRVB Antibodies

[1114] Any of the compositions and methods described herein can be used to expand an immune cell population. An immune cell provided herein includes an immune cell derived from a hematopoietic stem cell or an immune cell derived from a non-hematopoietic stem cell, e.g., by differentiation or de-differentiation.

[1115] An immune cell includes a hematopoietic stem cell, progeny thereof and/or cells that have differentiated from said HSC, e.g., lymphoid cells or myeloid cells. An immune cell can be an adaptive immune cell or an innate immune cell. Examples of immune cells include T cells, B cells, Natural Killer cells, Natural Killer T cells, neutrophils, dendritic cells, monocytes, macrophages, and granulocytes.

[1116] In some embodiments of any of the methods of compositions disclosed herein, an immune cell is a T cell. In some embodiments, a T cell includes a CD4+T cell, a CD8+T cell, a TCR alpha-beta T cell, a TCR gamma-delta T cell. In some embodiments, a T cell comprises a memory T cell (e.g., a central memory T cell, or an effector memory T cell (e.g., a T_{EMRA}) or an effector T cell.

[1117] In some embodiments of any of the methods of compositions disclosed herein, an immune cell is an NK cell.

[1118] In certain aspects of the present disclosure, immune cells, e.g., T cells, can be obtained from a unit of blood collected from a subject using any number of techniques known to the skilled artisan, such as FicollTM separation. In one aspect, cells from the circulating blood of an individual are obtained by apheresis. The apheresis product typically contains lymphocytes, including T cells, monocytes, granulocytes, B cells, other nucleated white blood cells, red blood cells, and platelets. In one aspect, the cells collected by apheresis may be washed to remove the plasma fraction and, optionally, to place the cells in an appropriate buffer or media for subsequent processing steps. In one embodiment, the cells are washed with phosphate buffered saline (PBS). In an alternative embodiment, the wash solution lacks calcium and may lack magnesium or may lack many if not all divalent cations. The methods described herein can include more than one selection step, e.g., more than one depletion step.

[1119] In one embodiment, the methods of the application can utilize culture media conditions comprising DMEM, DMEM F12, RPMI 1640, and/or AIM V media. The media can be supplemented with glutamine, HEPES buffer (e.g., 10 mM), serum (e.g., heat-inactivated serum, e.g., 10%), and/or beta mercaptoethanol (e.g., 55 uM). IN some embodiments, the culture conditions disclosed herein comprise one or more supplements, cytokines, growth factors, or hormones. In some embodiments, the culture condition comprises one or more of IL-2, IL-15 or IL-7, or a combination thereof.

[1120] Immune effector cells such as T cells may be activated and expanded generally using methods as described, for example, in U.S. Pat. Nos. 6,352,694; 6,534,055; or 6,905,680. Generally, a population of immune cells, may be expanded by contact with an agent that stimulates a CD3/TCR complex associated signal and a ligand that stimulates a costimulatory molecule on the surface of the T cells; and/or by contact with a cytokine, e.g., IL-2, IL-15 or IL-7. T cell expansion protocols can also include stimulation, such as by contact with an anti-CD3 antibody, or antigen-binding fragment thereof, or an anti-CD2 antibody immobilized on a surface, or by contact with a protein kinase C activator (e.g., bryostatin) in conjunction with a calcium ionophore. For example, a population of T cells can be contacted with an anti-CD3 antibody and an anti-CD28 antibody, under conditions appropriate for stimulating proliferation of the T cells. To stimulate proliferation of either CD4+T cells or CD8+T cells, an anti-CD3 antibody and an anti-CD28 antibody can be used. Examples of an anti-CD28 antibody include 9.3, B-T3, XR-CD28 (Diaclone, Besancon, France) can be used as can other methods commonly known in the art (Berg et al., Transplant Proc. 30(8):3975-3977, 1998; Haanen et al., J. Exp. Med. 190(9):13191328, 1999; Garland et al., J. Immunol Meth. 227(1-2):53-63, 1999).

[1121] A TIL population can also be expanded by methods known in the art. For example, a population of TILs can be expanded as described in Hall et al., Journal for ImmunoTherapy of Cancer (2016) 4:61, the entire contents of which are hereby incorporated by reference. Briefly, TILs can be isolated from a sample by mechanical and/or physical digestion. The resultant TIL population can be stimulated with an anti-CD3 antibody in the presence of non-dividing feeder cells. In some embodiments, the TIL population can be cultured, e.g., expanded, in the presence of IL-2, e.g., human IL-2. In some embodiments, the TIL cells can be cultured, e.g., expanded fora period of at least 1-21 days, e.g., at least 1, 2, 3, 4, 5, 6, 7, 8, 9, 10, 11, 12, 13, 14, 15, 16, 17, 18, 19, 20 or 21 days.

[1122] As disclosed herein, in some embodiments, an immune cell population (e.g., a T cell (e.g., a T_{EMRA} cell or a TIL population) can be expanded by contacting the immune cell population with an anti-TCRVB antibody, e.g., as described herein.

[1123] In some embodiments, the expansion occurs in vivo, e.g., in a subject. In some embodiments, a subject is administered an anti-TCRβV antibody molecule disclosed herein resulting in expansion of immune cells in vivo.

[1124] In some embodiments, the expansion occurs ex vivo, e.g., in vitro. In some embodiments, cells from a subject, e.g., T cells, e.g., TIL cells, are expanded in vitro with an anti-TCRβV antibody molecule disclosed herein. In some embodiments, the expanded TILs are administered to the subject to treat a disease or a symptom of a disease.

[1125] In some embodiments, a method of expansion disclosed herein results in an expansion of at least 1.1-10 fold, 10-20 fold, or 20-50 fold expansion. In some embodiments, the expansion is at least 1.1, 1.2, 1.3, 1.4, 1.5, 2, 3, 4, 5, 6, 7, 8, 9, 10, 15, 20, 25, 30, 35, 40, 45 or 50 fold expansion.

[1126] In some embodiments, a method of expansion disclosed herein comprises culturing, e.g., expanding, the cells for at least about 4 hours, 6 hours, 10 hours, 12 hours, 15 hours, 18 hours, 20 hours, or 22 hours. In some embodiments, a method of expansion disclosed herein comprises culturing, e.g., expanding, the cells for at least 1, 2, 3, 4, 5, 6, 7, 8, 9, 10, 11, 12, 13, 14, 15, 1,6 17, 18, 19, 20 or 21 days. In some embodiments, a method of expansion disclosed herein comprises culturing, e.g., expanding, the cells for at least about 1 week, 2 weeks, 3 weeks, 4 weeks, 5 weeks, 6 weeks, 7 weeks or 8 weeks.

[1127] In some embodiments, a method of expansion disclosed herein is performed on immune cells obtained from a healthy subject.

[1128] In some embodiments, a method of expansion disclosed herein is performed on immune cells (e.g., TILs) obtained from a subject having a disease, e.g., an infectious disease as disclosed herein.

[1129] In some embodiments, a method of expansion disclosed herein further comprises contacting the population of cells with an agent, that promotes, e.g., increases, immune cell expansion. In some embodiments, the agent comprises an immune checkpoint inhibitor, e.g., a PD-1 inhibitor, a LAG-3 inhibitor, a CTLA4 inhibitor, or a TIM-3 inhibitor. In some embodiments, the agent comprises a 4-1BB agonist, e.g., an anti-4-1BB antibody.

[1130] Without wishing to be bound by theory, it is believed that an anti-TCRβV antibody molecule disclosed herein can expand, e.g., selectively or preferentially expand, T cells expressing a T cell receptor (TCR) comprising a TCR alpha and/or TCR beta molecule, e.g., TCR alpha-beta T cells (αβ T cells). In some embodiments, an anti-TCRβV antibody molecule disclosed herein does not expand, or induce proliferation of T cells expressing a TCR comprising a TCR gamma and/or TCR delta molecule, e.g., TCR gamma-delta T cells (γδ T cells). In some embodiments, an anti-TCRβV antibody molecule disclosed herein, selectively or preferentially expands cx13 T cells over ya T cells.

[1131] Without wishing to be bound by theory, it is believed that, in some embodiments, γδ T cells are associated with cytokine release syndrome (CRS). In some embodiments, an anti-TCRβV antibody molecule disclosed herein results in selective expansion of non-γδ T cells, e.g., expansion of αβ T cels, thus reducing CRS.

[1132] In some embodiments, any of the compositions or methods disclosed herein result in an immune cell population having a reduction of, e.g., depletion of, γδ T cells. In some embodiments, the immune cell population is contacted with an agent that reduces, e.g., inhibits or depletes, γδ T cells, e.g., an anti-IL-17 antibody or an agent that binds to a TCR gamma and/or TCR delta molecule.

### Uses and Combination Therapies

[1133] Methods described herein include treating an infectious disease in a subject by using an anti-TCRβV antibody molecule, a multispecific or multifunctional molecule described herein, e.g., using a pharmaceutical composition described herein. Also provided are methods for reducing or ameliorating a symptom of an infectious disease in a subject, as well as methods for inhibiting the growth of an infectious disease and/or killing one or more infectious agents.

[1134] In embodiments, the infectious disease is selected from Epstein-Barr virus (EBV), influenza, human immunodeficiency virus (HIV), simian immunodeficiency virus (SIV), tuberculosis, malaria, or human cytomegalovirus (HCMV), or a combination thereof.

[1135] In embodiments, the anti-TCRβV antibody molecule, multispecific or multifunctional molecules (or pharmaceutical composition) are administered in a manner appropriate to the disease to be treated or prevented. The quantity and frequency of administration will be determined by such factors as the condition of the patient, and the type and severity of the patient's disease. Appropriate dosages may be determined by clinical trials. For example, when “an effective amount” or “a therapeutic amount” is indicated, the precise amount of the pharmaceutical composition (or multispecific or multifunctional molecules) to be administered can be determined by a physician with consideration of individual differences in symptoms (or severity thereof), extent of infection, age, weight, and condition of the subject. In embodiments, the pharmaceutical composition described herein can be administered at a dosage of 10⁴ to 10⁹ cells/kg body weight, e.g., 10⁵ to 10⁶ cells/kg body weight, including all integer values within those ranges. In embodiments, the pharmaceutical composition described herein can be administered multiple times at these dosages. In embodiments, the pharmaceutical composition described herein can be administered using infusion techniques described in immunotherapy (see, e.g., Rosenberg et al., New Eng. J. of Med. 319:1676, 1988).

[1136] In embodiments, the anti-TCRβV antibody molecule, multispecific or multifunctional molecules or pharmaceutical composition is administered to the subject parentally. In embodiments, the cells are administered to the subject intravenously, subcutaneously, intranodally, intramuscularly, intradermally, or intraperitoneally. In embodiments, the cells are administered, e.g., injected, directly into a lymph node. In embodiments, the cells are administered as an infusion (e.g., as described in Rosenberg et al., New Eng. J. of Med. 319:1676, 1988) or an intravenous push. In embodiments, the cells are administered as an injectable depot formulation.

[1137] In embodiments, the subject is a mammal. In embodiments, the subject is a human, monkey, pig, dog, cat, cow, sheep, goat, rabbit, rat, or mouse. In embodiments, the subject is a human. In embodiments, the subject is a pediatric subject, e.g., less than 18 years of age, e.g., less than 17, 16, 15, 14, 13, 12, 11, 10, 9, 8, 7, 6, 5, 4, 3, 2, 1 or less years of age. In embodiments, the subject is an adult, e.g., at least 18 years of age, e.g., at least 19, 20, 21, 22, 23, 24, 25, 25-30, 30-35, 35-40, 40-50, 50-60, 60-70, 70-80, or 80-90 years of age.

### Combination Therapies

[1138] The anti-TCRβV antibody molecule, multispecific or multifunctional molecules disclosed herein can be used in combination with a second therapeutic agent or procedure.

[1139] In embodiments, the anti-TCRβV antibody molecule, multispecific or multifunctional molecule and the second therapeutic agent or procedure are administered/performed after a subject has been diagnosed with an infectious disease, e.g., before the infectious disease has been eliminated from the subject. In embodiments, the anti-TCRβV antibody molecule, multispecific or multifunctional molecule and the second therapeutic agent or procedure are administered/performed simultaneously or concurrently. For example, the delivery of one treatment is still occurring when the delivery of the second commences, e.g., there is an overlap in administration of the treatments. In other embodiments, the anti-TCRβV antibody molecule, multispecific or multifunctional molecule and the second therapeutic agent or procedure are administered/performed sequentially. For example, the delivery of one treatment ceases before the delivery of the other treatment begins.

[1140] In embodiments, combination therapy can lead to more effective treatment than monotherapy with either agent alone. In embodiments, the combination of the first and second treatment is more effective (e.g., leads to a greater reduction in symptoms and/or infectious agents) than the first or second treatment alone. In embodiments, the combination therapy permits use of a lower dose of the first or the second treatment compared to the dose of the first or second treatment normally required to achieve similar effects when administered as a monotherapy. In embodiments, the combination therapy has a partially additive effect, wholly additive effect, or greater than additive effect.

[1141] In one embodiment, the anti-TCRBV antibody, multispecific or multifunctional molecule is administered in combination with a therapy, e.g., a therapy for treating the infectious disease. The administration of the multispecific or multifunctional molecule and the therapy can be sequential (with or without overlap) or simultaneous. Administration of the anti-TCRBV antibody, multispecific or multifunctional molecule can be continuous or intermittent during the course of therapy.

[1142] Infectious Diseases

[1143] In some embodiments, the anti-TCRβV antibody molecules, e.g., the multispecific antibody molecules, disclosed herein can be used to treat infectious diseases. In some embodiments, the antibody molecules, e.g., the multispecific antibody molecules, disclosed herein deplete cells expressing a viral or bacterial antigen. In some embodiments, the anti-TCRβ V antibody molecule further comprises a binding specificity that binds to an antigen present on the surface of an infected cell, e.g., a viral infected cell.

[1144] Some examples of pathogenic viruses causing infections treatable by methods include HIV, hepatitis (A, B, or C), herpes virus (e.g., VZV, HSV-1, HAV-6, HSV-II, and CMV, Epstein Barr virus), adenovirus, influenza virus, flaviviruses, echovirus, rhinovirus, coxsackie virus, cornovirus, respiratory syncytial virus, mumps virus, rotavirus, measles virus, rubella virus, parvovirus, vaccinia virus, HTLV virus, dengue virus, papillomavirus, molluscum virus, poliovirus, rabies virus, JC virus and arboviral encephalitis virus. In one embodiment, the infection is an influenza infection.

[1145] In another embodiment, the infection is a hepatitis infection, e.g., a Hepatitis B or C infection.

[1146] Exemplary viral disorders that can be treated include, but are not limited to, Epstein Bar Virus (EBV), influenza virus, HIV, SIV, tuberculosis, malaria and HCMV.

[1147] Some examples of pathogenic bacteria causing infections treatable by methods of the invention include syphilis, chlamydia, rickettsial bacteria, mycobacteria, staphylococci, streptococci, pneumonococci, meningococci and conococci, klebsiella, proteus, serratia, pseudomonas, legionella, diphtheria, salmonella, bacilli, cholera, tetanus, botulism, anthrax, plague, leptospirosis, and Lymes disease bacteria. The anti-TCRβV antibody molecules can be used in combination with existing treatment modalities for the aforesaid infections. For example, treatments for syphilis include penicillin (e.g., penicillin G.), tetracycline, doxycycline, ceftriaxone and azithromycin.

### CRS Grading

[1148] In some embodiments, CRS can be graded in severity from 1-5 as follows. Grades 1-3 are less than severe CRS. Grades 4-5 are severe CRS. For Grade 1 CRS, only symptomatic treatment is needed (e.g., nausea, fever, fatigue, myalgias, malaise, headache) and symptoms are not life threatening. For Grade 2 CRS, the symptoms require moderate intervention and generally respond to moderate intervention. Subjects having Grade 2 CRS develop hypotension that is responsive to either fluids or one low-dose vasopressor; or they develop grade 2 organ toxicity or mild respiratory symptoms that are responsive to low flow oxygen (<40% oxygen). In Grade 3 CRS subjects, hypotension generally cannot be reversed by fluid therapy or one low-dose vasopressor. These subjects generally require more than low flow oxygen and have grade 3 organ toxicity (e.g., renal or cardiac dysfunction or coagulopathy) and/or grade 4 transaminitis. Grade 3 CRS subjects require more aggressive intervention, e.g., oxygen of 40% or higher, high dose vasopressor(s), and/or multiple vasopressors. Grade 4 CRS subjects suffer from immediately life-threatening symptoms, including grade 4 organ toxicity or a need for mechanical ventilation. Grade 4 CRS subjects generally do not have transaminitis. In Grade 5 CRS subjects, the toxicity causes death. Sets of criteria for grading CRS are provided herein as Table 12, Table 13, and Table 14. Unless otherwise specified, CRS as used herein refers to CRS according to the criteria of Table 13.

[1149] In embodiments, CRS is graded according to Table 12:

TABLE 12
CRS grading

| | |
|---|---|
| Gr1 | Supportive care only |
| Gr2 | IV therapies +/− hospitalization. |
| Gr3 | Hypotension requiring IV fluids or low-dose vasoactives or |
| | hypoxemia requiring oxygen, |
| | CPAP, or BIPAP. |
| Gr4 | Hypotension requiring high-dose vasoactives or hypoxemia |
| | requiring mechanical ventilation. |
| Gr 5 | Death |

TABLE 13
CTCAE v 4.0 CRS grading scale

| CRS grade | Characteristics |
|---|---|
| Grade 1 | Mild; No infusion interruption; No intervention |
| Grade 2 | Infusion interruption indicated but responds promptly to |
| | symptomatic treatment (e.g., |
| | antihistamines, NSAIDS, narcotics, IV fluids); |
| | prophylactic medications indicated for |
| | <= 24 hrs |
| Grade 3 | Prolonged (e.g., not rapidly responsive to symptomatic |
| | medications and/or brief |
| | interruption of infusion); recurrence of symptoms |
| | following initial improvement; |
| | hospitalization indicated for clinical sequelae |
| | (e.g., renal impairment, pulmonary infiltrates) |
| Grade 4 | Life threatening consequences; |
| | pressor or ventilator support |

TABLE 14

| NCI CRS | grading scale |
|---|---|
| CRS grade | Characteristics |
| Grade 1 | Symptoms are not life threatening and require symptomatic |
| | treatment only; e.g., fever, |
| | nausea, fatigue, headache, myalgias, malaise |
| Grade 2 | Symptoms require and respond to moderate intervention; |
| | Oxygen requirement <40% |
| | or hypotension responsive to fluids or low dose pressors or |
| | Grade 2 organ toxicity |
| Grade 3 | Symptoms require and respond to aggressive intervention; |
| | Oxygen requirement |
| | >= 40% or Hypotension requiring high dose or multiple |
| | pressors or grade 3 organ |
| | toxicity or grade 4 transaminitis |
| Grade 4 | Life threatening symptoms Requirement for ventilator |
| | support or Grade 4; organ |
| | toxicity (excluding transaminitis) |

### EXAMPLES

### Example 1

### Humanization of α-TRBV6-5 Antibody Clone Antibody A

[1150] The germline for the mouse a-TCRI3 antibody clone Antibody A VH and VL were assigned using IMGT nomenclature, with CDR regions defined by a combined Kabat and Chothia classification. SEQ ID NO: 1 and SEQ ID NO: 2 are the Antibody A VH and VL sequences respectively where the VH germline is mouse IGHV1S12*01 and the VL germline is mouse IGKV6-15*01. SEQ ID NOs: 3-5 are the Antibody A VH CDR regions 1-3 respectively and SEQ ID NOs: 6-8 correspond to the VL CDR regions 1-3 (as described in Table 3).

[1151] Humanization of the Antibody A VH and VL sequences was done separately using similar methodology. Amino acids positions were identified in the framework regions which were important for the success of CDR grafting. Human germline sequences were identified which preserved the necessary residues and contained a high amount of overall identity. When the human germline framework sequence did not contain a matching important amino acid, it was back mutated to match the mouse sequence. CDR regions were grafted onto the human germline unchanged. The Antibody A VH was humanized into human IGHV1-69*01 and the Antibody A VL was humanized into IGKV1-17*01 and IGKV1-27*01. All 3 humanized sequences were confirmed to contain no introduced potential negative post translational modification sites such as NG, DG, NS, NN, DS, NT, NXS, or NXT as a result of the humanization process. SEQ ID NO: 9 is the humanized Antibody A-H.1 VH and SEQ ID NOs: 10 and 11 are the humanized VL IGKV1-17*01 and IGKV1-27*01 germlines respectively (as described in Table 3). FIGS. 1A and 1B show the murine and humanized sequences with annotations depicting the CDR and framework regions (FR).

### Example 2

### Humanization of α-TRBV12-3 and TRBV12-4 Antibody Clone Antibody B

[1152] The germline for the mouse a-TCRI3 antibody clone Antibody B VH and VL were assigned using IMGT nomenclature, with CDR regions defined by a combined Kabat and Chothia classification. SEQ ID NO: 15 and SEQ ID NO: 16 are the Antibody B VH and VL sequences respectively where the VH germline is mouse IGHV5-17*02 and the VL germline is mouse IGKV4-50*01. SEQ ID NOs: 17-19 are the B-H VH CDR regions 1-3 respectively and SEQ ID NOs: 20-22 are the B-H VL CDR regions 1-3 (as described in Table 4).

[1153] The method applied to humanize Antibody A described in Example 1 was used to humanize Antibody B. The Antibody B VH was humanized into human IGHV3-30*01, IGHV3-48*01, and IGHV3-66*01 and the Antibody B VL was humanized into human IGKV1-9*01, IGKV1-39*01, IGKV3-15*01, IGLV1-47*01 and IGLV3-10*01. SEQ ID NOs: 23-25 are the B-H.1A, B-H.1B, and B-H.1C humanized heavy chains and SEQ ID NOs: 26-30 are the B-H.1D, B-H.1E, B-H.1F, B-H.1G and B-H.1H humanized light chains (as described in Table 4). FIGS. 2A and 2B show the murine and humanized sequences with annotations depicting the CDR and framework regions (FR).

### Example 3

### Characteristics of Anti-TCRβV antibodies

[1154] Introduction

[1155] Current bispecific constructs designed to redirect T cells to promote tumor cell lysis for cancer immunotherapy typically utilize single chain variable fragments (scFvs) that are derived from monoclonal antibodies (mAb) directed against the CD3e subunit of the T cell receptor (TCR). However, there are limitations to this approach which may prevent the full realization of the therapeutic potential for such bispecific constructs. Previous studies have shown that, e.g., low “activating” doses of anti-CD3e mAb can cause long-term T cell dysfunction and exert immunosuppressive effects. In addition, anti-CD3e mAbs bind to all T cells and thus activate equally all T cells, which has been associated with the first dose side effects of anti-CD3e mAbs that result from massive T cell activation. These large number of activated T cells secrete substantial amounts of cytokines, the most important of which is Interferon gamma (IFNγ). This excess amount of IFNγ in turn, e.g., activates macrophages which then can overproduce proinflammatory cytokines such as IL-1, IL-6 and TNF-alpha, causing a “cytokine storm” known as the cytokine release syndrome (CRS). Thus, it might be advantageous to develop antibodies that are capable of binding and activating only a subset of necessary effector T cells to reduce the CRS.

[1156] Results

[1157] To that end, antibodies directed to the variable chain of the beta subunit of TCR (TCR Vb) were identified. These anti-TCR Vb antibodies bind and activate a subset of T cells, but with, e.g., no or markedly reduced CRS. Using plate-bound anti-TCR Vb13.1 mAbs (A-H.1 and A-H.2) it was shown that a population of T cells, defined by positive staining with A-H.1, can be expanded (from ˜5% of T cells on day 0 to almost 60% of total T cells on day 6 of cell culture) (FIGS. 4A-4C). For this experiment, human CD3+T cells were isolated using magnetic-bead separation (negative selection) and activated with immobilized (plate-coated) A-H.1 or OKT3 (anti-CD3e) antibodies at 100nM for 6 days. The expanded Vb13.1+T cells display cytolytic activity against transformed cell line RPMI-8226 when co-cultured with purified CD3+T cells (FIGS. 5A-5B).

[1158] Next, the ability of PBMCs activated by anti-TCR VB antibodies to produce cytokines was assessed. The cytokine production of PBMCs activated with anti-TCR VB antibodies was compared to the cytokine production of PBMCs activated with: (i) anti-CD3e antibodies (OKT3 or SP34-2); (ii) anti-TCR V alpha (TCR VA) antibodies including anti-TCR VA 12.1 antibody 6D6.6, anti-TCR VA24JA18 antibody 6B11; (iii) anti-TCR alpha beta antibody T10B9; and/or (iv) isotype control (BGM0109). The anti-TCR VB antibodies tested include: humanized anti-TCRVB 13.1 antibodies (A-H.1, or A-H.2), murine anti-TCR VB5 antibody Antibody E, murine anti-TCR VB8.1 antibody Antibody B, and murine anti-TCR VB12 antibody Antibody D. BGM0109 comprises the amino acid sequence of

(SEQ ID NO: 3282)
METDTLLLWVLLLWVPGSTGGLNDIFEAQKIEWHEGGGGSEPRTDTDTCPN
PPDPCPTCPTPDLLGGPSVFIFPPKPKDVLMISLTPKITCVVVDVSEEEPD
VQFNWYVNNVEDKTAQTETRQRQYNSTYRVVSVLPIKHQDWMSGKVFKCKV
NNNALPSPIEKTISKPRGQVRVPQIYTFPPPIEQTVKKDVSVTCLVTGFLP
QDIHVEWESNGQPQPEQNYKNTQPVLDSDGSYFLYSKLNVPKSRWDQGDSF
TCSVIHEALHNEIRMTKTISRSLGNGGGGS.

[1159] As shown in FIG. 6A, when plate-bound A-H.1 or A-H.2, or anti-CD3e antibodies (OKT3 or SP34-2) were used to activate human PBMCs, the T cell cytokine IFNγ was induced (FIG. 6A). All anti-TCR VB antibodies tested had a similar effect on the production of IFNγ(FIG. 6B). The anti-TCR VA antibodies did not induce similar IFNγ production.

[1160] With respect to IL-2 production, PBMCs activated with A-H.1 and A-H.2 resulted in increased IL-2 production (FIG. 7A) with delayed kinetics (FIG. 7B) as compared to PBMCs activated with anti-CD3e antibodies (OKT3 or SP34-2). FIG. 7B shows that anti-TCR VB antibody activated PBMCs demonstrate peak production of IL-2 at Day 5 or Day 6 post-activation (incubation with plate-coated antibodies). In contrast, IL-2 production in PBMCs activated with OKT3 peaked at day 2 post-activation. As with IFNG, the IL-2 effect (e.g., enhanced production of IL-2 and delayed kinetics) was similar across all anti-TCR VB antibodies tested (FIG. 7B).

[1161] The production of cytokines IL-6, IL-10 and TNF-alpha which are associated with “cytokine storms” (and accordingly CRS) was also assessed under similar conditions. FIGS. 8A, 9A and 10A shows that while PBMCs activated with anti-CD3e antibodies demonstrate production of IL-6 (FIG. 8A), TNF-alpha (FIG. 9A) and IL-10 (FIG. 10A), no or little induction of these cytokines was observed with PBMCs activated with A-H.1 or A-H.2. As shown in FIGS. 9B and 10B, TNF-alpha and IL-10 production was not induced by activation of PBMCs with any of the anti-TCR VB antibodies.

[1162] It was further noted that the kinetics of IFNγ production by A-H.1-activated CD3+T cells was delayed relative to those produced by CD3+T cells activated by anti-CD3e mAbs (OKT3 and SP34-2) (FIGS. 11A and 11B).

[1163] Finally, it was observed that the subset of memory effector T cells known as T_{EMRA} was preferentially expanded in CD8+T cells activated by A-H.1 or A-H.2 (FIG. 12). Isolated human PBMCs were activated with immobilized (plate-coated) anti-CD3e or anti-TCR Vβ13.1 at 100 nM for 6-days. After a 6-day incubation, T-cell subsets were identified by FACS staining for surface markers for Naive T cell (CD8+, CD95-, CD45RA+, CCR7+), T stem cell memory (TSCM; CD8+, CD95+, CD45RA+, CCR7+), T central memory (Tcm; CD8+, CD95+, CD45RA-, CCR7+), T effector memory (Tem; CD8+, CD95+, CD45RA-, CCR7-), and T effector memory re-expressing CD45RA (Temra; CD8+, CD95+, CD45RA+, CCR7-). Human PBMCs activated by anti-TCR Vβ13.1 antibodies (A-H.1 or A-H.2) increased CD8+TSCM and Temra T cell subsets when compared to PBMCs activated by anti-CD3e antibodies (OKT3 or SP34-2). Similar expansion was observed with CD4+T cells.

[1164] Conclusion

[1165] The data provided in this Example show that antibodies directed against TCR Vb can, e.g., preferentially activate a subset of T cells, leading to an expansion of T_{EMRA}, which can, e.g., promote tumor cell lysis but not CRS. Thus, bispecific constructs utilizing either a Fab or scFv or a peptide directed to the TCR Vb can, e.g., be used to activate and redirect T cells to promote tumor cell lysis for cancer immunotherapy, without, e.g., the harmful side-effects of CRS associated with anti-CD3e targeting.

### INCORPORATION BY REFERENCE

[1166] All publications and patents mentioned herein are hereby incorporated by reference in their entirety as if each individual publication or patent was specifically and individually indicated to be incorporated by reference.

### EQUIVALENTS

[1167] Those skilled in the art will recognize, or be able to ascertain using no more than routine experimentation, many equivalents to the specific embodiments of the invention described herein. Such equivalents are intended to be encompassed by the following claims.

What is claimed is:

1. A method of expanding, e.g., increasing the number of, a T cell population comprising a TCRβV molecule (e.g., as described herein), the method comprising: contacting the T cell population with an antibody molecule, e.g., humanized antibody molecule, which binds, e.g., specifically binds, to a T cell receptor beta variable chain (TCRβV) region, thereby expanding the T cell population, wherein the T cell population is obtained from or comprised in a subject having an infectious disease.

2. A method of treating a subject having an infectious disease, the method comprising administering an effective amount of an anti-TCRβV antibody molecule (e.g., a TCRβV agonist) to the subject, thereby treating the infectious disease.

3. A method of evaluating, e.g., identifying the level or activity of a TCRβV molecule in a subject having an infectious disease, the method comprising acquiring a status for the TCRβV molecule in the subject;
wherein the level or activity of the TCRβV molecule is higher (e.g., at least about 1.1, 1.2, 1.3, 1.4, 1.5, 2, 3, 4, 5, 6, 7, 8, 9, 10, 20, 30, 40, 50, 60, 70, 80, 90, 100, 200, 300, 400, 500, 600, 700, 800, 900, 1000, 5000, 10,000, or 100,000-fold higher) relative to the level or activity of the TCRβV molecule in a healthy subject (e.g., a subject that does not have the infectious disease).

4. A method of treating a subject having an infectious disease, the method comprising:
(i) acquiring a status for the TCRβV molecule in the subject; and
(ii) administering an effective amount of an anti-TCRβV antibody molecule (e.g., a TCRβV agonist) to the subject, thereby treating the infectious disease;
wherein the level or activity of the TCRβV molecule is higher (e.g., at least about 1.1, 1.2, 1.3, 1.4, 1.5, 2, 3, 4, 5, 6, 7, 8, 9, 10, 20, 30, 40, 50, 60, 70, 80, 90, 100, 200, 300, 400, 500, 600, 700, 800, 900, 1000, 5000, 10,000, or 100,000-fold higher) relative to the level or activity of the TCRβV molecule in a healthy subject (e.g., a subject that does not have the infectious disease).

5. A method of evaluating a subject for the presence of an infectious disease, the method comprising:
(i) acquiring a status for one or more TCRβV molecules in a biological sample from the subject and in a biological sample from a healthy subject (e.g., a subject that does not have the infectious disease); and
(ii) determining whether one or more of the TCRβV molecules exhibits an elevated level or activity in the subject relative to the healthy subject;
wherein an elevated level or activity in the subject relative to in the healthy subject is indicative of the presence of the infectious disease.

6. A method of treating a subject having an infectious disease, the method comprising:
(i) acquiring a status for one or more TCRβV molecules in a biological sample from the subject and in a biological sample from a healthy subject (e.g., a subject that does not have the infectious disease);
(ii) determining whether one or more of the TCRβV molecules exhibits an elevated level or activity in the subject relative to the healthy subject; and
(iii) if an elevated level or activity in the subject relative to in the healthy subject is determined, administering an effective amount of an anti-TCRβV antibody molecule (e.g., a TCRβV agonist) to the subject.

7. The method of any of the preceding claims, wherein the status is indicative of the subject having the infectious disease or a symptom thereof.

8. The method of any of the preceding claims, wherein the status is indicative of responsiveness to a therapy, e.g., a TCRβV molecule.

9. The method of any of the preceding claims, wherein the status is determined, e.g., measured, by an assay described herein.

10. The method of any of the preceding claims, wherein the acquiring comprises: isolating a biological sample from the subject, contacting the biological sample with an anti-TCRβV antibody molecule (e.g., the same anti-TCRβV antibody molecule or a different anti-TCRβV antibody molecule), and determining a level of T cell expansion in the biological sample, e.g., relative to the level of T cell expansion in a biological sample obtained from a healthy subject (e.g., a subject that does not have the infectious disease).

11. The method of claim 10, further comprising administering expanded T cells from the biological sample to the subject.

12. The method of any of the preceding claims, wherein the acquiring comprises: isolating a biological sample from the subject, contacting the biological sample with an anti-TCRβV antibody molecule (e.g., the same anti-TCRβV antibody molecule or a different anti-TCRβV antibody molecule), and determining a level of T cell function (e.g., cytotoxic activity) in the biological sample, e.g., relative to the level of T cell expansion in a biological sample obtained from a healthy subject (e.g., a subject that does not have the infectious disease).

13. A method of identifying one or more TCRβV molecules associated with a disease, the method comprising:
(i) acquiring a status for a plurality of TCRβV molecules in a biological sample from a first subject having the disease and in a biological sample from a second subject not having the disease; and
(ii) determining whether one or more of the TCRβV molecules exhibits an elevated level or activity in the first subject relative to the second subject;
thereby identifying one or more TCRβV molecules associated with the disease.

14. The method of any of the preceding claims, wherein the infectious disease is selected from Epstein-Barr virus (EBV), influenza, human immunodeficiency virus (HIV), simian immunodeficiency virus (SIV), tuberculosis, malaria, or human cytomegalovirus (HCMV).

15. The method of any of the preceding claims, wherein the TCRβV is selected from TCRβV V5-6, TCRβV V6-5, TCRβV V7, TCRβV V9, TCRβV V10, TCRβV V12 (e.g., TCRβV V12-4), TCRβV V13, TCRβV V14, TCRβV V19, TCRβV V23-1, or a subfamily member thereof (e.g., as listed in Table 1 or Table 2).

16. The method of any of the preceding claims, wherein the anti-TCRβV antibody molecule induces expansion, e.g., increasing the number of, a T cell population comprising a TCRβV molecule (e.g., the TCRβV bound by the anti-TCRβV antibody molecule).

17. The method of claim 16, wherein the T cell population comprises CD4 T cells, CD8 T cells, or CD3 T cells.

18. The method of claim 16, wherein the T cell population derived from peripheral blood.

19. The method of any of the preceding claims, wherein the anti-TCRβV antibody molecule comprises:
(1) a heavy chain complementarity determining region (HC CDR1), a HC CDR2 and/or a HC CDR3 of SEQ ID NO: 3, SEQ ID NO: 4, and/or SEQ ID NO: 5; and/or
(2) a light chain complementarity determining region 1 (LC CDR1), a LC CDR2, and/or a LC CDR3 of SEQ ID NO: 6, SEQ ID NO: 7, and/or SEQ ID NO: 8.

20. The method of any of the preceding claims, wherein the anti-TCRβV antibody molecule comprises:
(1) a heavy chain complementarity determining region (HC CDR1), a HC CDR2 and/or a HC CDR3 of SEQ ID NO: 45, SEQ ID NO: 46, and/or SEQ ID NO: 47; and/or
(2) a light chain complementarity determining region 1 (LC CDR1), a LC CDR2, and/or a LC CDR3 of SEQ ID NO: 51, SEQ ID NO: 52, and/or SEQ ID NO: 53.

21. The method of any of the preceding claims, wherein the anti-TCRβV antibody molecule comprises:
(1) a heavy chain complementarity determining region (HC CDR1), a HC CDR2 and/or a HC CDR3 of SEQ ID NO: 48, SEQ ID NO: 49, and/or SEQ ID NO: 50; and/or
(2) a light chain complementarity determining region 1 (LC CDR1), a LC CDR2, and/or a LC CDR3 of SEQ ID NO: 54, SEQ ID NO: 55, and/or SEQ ID NO: 56.

22. The method of any of the preceding claims, wherein the anti-TCRβV antibody molecule comprises:
(1) a heavy chain complementarity determining region (HC CDR1), a HC CDR2 and/or a HC CDR3 of SEQ ID NO: 17, SEQ ID NO: 18, and/or SEQ ID NO: 19; and/or
(2) a light chain complementarity determining region 1 (LC CDR1), a LC CDR2, and/or a LC CDR3 of SEQ ID NO: 20, SEQ ID NO: 21, and/or SEQ ID NO: 22.

23. The method of any of the preceding claims, wherein the anti-TCRβV antibody molecule comprises:
(1) a heavy chain complementarity determining region (HC CDR1), a HC CDR2 and/or a HC CDR3 of SEQ ID NO: 57, SEQ ID NO: 58, and/or SEQ ID NO: 59; and/or
(2) a light chain complementarity determining region 1 (LC CDR1), a LC CDR2, and/or a LC CDR3 of SEQ ID NO: 63, SEQ ID NO: 64, and/or SEQ ID NO: 65.

24. The method of any of the preceding claims, wherein the anti-TCRβV antibody molecule comprises:
(1) a heavy chain complementarity determining region (HC CDR1), a HC CDR2 and/or a HC CDR3 of SEQ ID NO: 60, SEQ ID NO: 61, and/or SEQ ID NO: 62; and/or (2) a light chain complementarity determining region 1 (LC CDR1), a LC CDR2, and/or a LC CDR3 of SEQ ID NO: 66, SEQ ID NO: 67, and/or SEQ ID NO: 68.

25. The method of any of the preceding claims, wherein the anti-TCRβV antibody molecule comprises a VH having at least 85% (e.g., at least 85%, 90%, 95%, 96%, 97%, 98%, 99%, or 100%) sequence identity to SEQ ID NO: 9.

26. The method of any of the preceding claims, wherein the anti-TCRβV antibody molecule comprises a VL having at least 85% (e.g., at least 85%, 90%, 95%, 96%, 97%, 98%, 99%, or 100%) sequence identity to SEQ ID NO: 10.

27. The method of any of the preceding claims, wherein the anti-TCRβV antibody molecule comprises a VH having at least 85% (e.g., at least 85%, 90%, 95%, 96%, 97%, 98%, 99%, or 100%) sequence identity to SEQ ID NO: 9 and a VL having at least X % sequence identity to SEQ ID NO: 10.

28. The method of any of the preceding claims, wherein the anti-TCRβV antibody molecule comprises a heavy chain having at least 85% (e.g., at least 85%, 90%, 95%, 96%, 97%, 98%, 99%, or 100%) sequence identity to SEQ ID NO: 69.

29. The method of any of the preceding claims, wherein the anti-TCRβV antibody molecule comprises a heavy chain having at least 85% (e.g., at least 85%, 90%, 95%, 96%, 97%, 98%, 99%, or 100%) sequence identity to SEQ ID NO: 70.

30. The method of any of the preceding claims, wherein the anti-TCRβV antibody molecule comprises a heavy chain having at least 85% (e.g., at least 85%, 90%, 95%, 96%, 97%, 98%, 99%, or 100%) sequence identity to SEQ ID NO: 71.

31. The method of any of the preceding claims, wherein the anti-TCRβV antibody molecule comprises a light chain having at least 85% (e.g., at least 85%, 90%, 95%, 96%, 97%, 98%, 99%, or 100%) sequence identity to SEQ ID NO: 72.

32. The method of any of the preceding claims, wherein the anti-TCRβV antibody molecule comprises a heavy chain having at least 85% (e.g., at least 85%, 90%, 95%, 96%, 97%, 98%, 99%, or 100%) sequence identity to SEQ ID NO: 69 and a light chain having at least 85% (e.g., at least 85%, 90%, 95%, 96%, 97%, 98%, 99%, or 100%) sequence identity to SEQ ID NO: 72.

33. The method of any of the preceding claims, wherein the anti-TCRβV antibody molecule comprises a heavy chain having at least 85% (e.g., at least 85%, 90%, 95%, 96%, 97%, 98%, 99%, or 100%) sequence identity to SEQ ID NO: 70 and a light chain having at least 85% (e.g., at least 85%, 90%, 95%, 96%, 97%, 98%, 99%, or 100%) sequence identity to SEQ ID NO: 72.

34. The method of any of the preceding claims, wherein the anti-TCRβV antibody molecule comprises a heavy chain having at least 85% (e.g., at least 85%, 90%, 95%, 96%, 97%, 98%, 99%, or 100%) sequence identity to SEQ ID NO: 71 and a light chain having at least 85% (e.g., at least 85%, 90%, 95%, 96%, 97%, 98%, 99%, or 100%) sequence identity to SEQ ID NO: 72.

35. The method of any of the preceding claims, wherein the anti-TCRβV antibody molecule is co-expressed with an IgJ chain (e.g., an IgJ chain comprising at least 85%, 90%, 95%, 96%, 97%, 98%, 99%, or 100% sequence identity to SEQ ID NO: 76).

36. The method of any of the preceding claims, wherein the anti-TCRβV antibody molecule comprises a heavy chain having at least 85% (e.g., at least 85%, 90%, 95%, 96%, 97%, 98%, 99%, or 100%) sequence identity to SEQ ID NO: 69 and a light chain having at least 85% (e.g., at least 85%, 90%, 95%, 96%, 97%, 98%, 99%, or 100%) sequence identity to SEQ ID NO: 72;
and wherein the anti-TCRβV antibody molecule is co-expressed with an IgJ chain (e.g., an IgJ chain comprising at least 85%, 90%, 95%, 96%, 97%, 98%, 99%, or 100% sequence identity to SEQ ID NO: 76).

37. The method of any of the preceding claims, wherein the anti-TCRβV antibody molecule comprises a VH having at least 85% (e.g., at least 85%, 90%, 95%, 96%, 97%, 98%, 99%, or 100%) sequence identity to SEQ ID NO: 15.

38. The method of any of the preceding claims, wherein the anti-TCRβV antibody molecule comprises a VL having at least 85% (e.g., at least 85%, 90%, 95%, 96%, 97%, 98%, 99%, or 100%) sequence identity to SEQ ID NO: 16.

39. The method of any of the preceding claims, wherein the anti-TCRβV antibody molecule comprises a VH having at least 85% (e.g., at least 85%, 90%, 95%, 96%, 97%, 98%, 99%, or 100%) sequence identity to SEQ ID NO: 23.

40. The method of any of the preceding claims, wherein the anti-TCRβV antibody molecule comprises a VH having at least 85% (e.g., at least 85%, 90%, 95%, 96%, 97%, 98%, 99%, or 100%) sequence identity to SEQ ID NO: 24.

41. The method of any of the preceding claims, wherein the anti-TCRβV antibody molecule comprises a VH having at least 85% (e.g., at least 85%, 90%, 95%, 96%, 97%, 98%, 99%, or 100%) sequence identity to SEQ ID NO: 25.

42. The method of any of the preceding claims, wherein the anti-TCRβV antibody molecule comprises a VL having at least 85% (e.g., at least 85%, 90%, 95%, 96%, 97%, 98%, 99%, or 100%) sequence identity to SEQ ID NO: 26.

43. The method of any of the preceding claims, wherein the anti-TCRβV antibody molecule comprises a VL having at least 85% (e.g., at least 85%, 90%, 95%, 96%, 97%, 98%, 99%, or 100%) sequence identity to SEQ ID NO: 27.

44. The method of any of the preceding claims, wherein the anti-TCRβV antibody molecule comprises a VL having at least 85% (e.g., at least 85%, 90%, 95%, 96%, 97%, 98%, 99%, or 100%) sequence identity to SEQ ID NO: 28.

45. The method of any of the preceding claims, wherein the anti-TCRβV antibody molecule comprises a VL having at least 85% (e.g., at least 85%, 90%, 95%, 96%, 97%, 98%, 99%, or 100%) sequence identity to SEQ ID NO: 29.

46. The method of any of the preceding claims, wherein the anti-TCRβV antibody molecule comprises a VL having at least 85% (e.g., at least 85%, 90%, 95%, 96%, 97%, 98%, 99%, or 100%) sequence identity to SEQ ID NO: 30.

47. The method of any of the preceding claims, wherein the anti-TCRβV antibody molecule comprises a VH amino acid sequence as listed in Table 3 or Table 4, and/or a VL amino acid sequence as listed in Table 3 or Table 4.

48. The method of any of the preceding claims, wherein the anti-TCRβV antibody molecule selectively or preferentially expands αβ T cels over y6 T cells.

49. The method of any of the preceding claims, wherein the anti-TCRβV antibody molecule does not induce cytokine release syndrome (CRS).

50. The method of any of the preceding claims, wherein binding of the anti-TCRβV antibody molecule to the TCRβV region results in one, two, three, four, five, six, seven, eight, nine, ten or more (e.g., all) of the following:
(i) reduced level, e.g., expression level, and/or activity of IL-10;
(ii) reduced level, e.g., expression level, and/or activity of IL-6;
(iii) reduced level, e.g., expression level, and/or activity of TNFα;
(iv) increased level, e.g., expression level, and/or activity of IL-2;
(v) a delay, e.g., at least 1, 2, 3, 4, 5, 6, 7, 8, 9, 10 or more hours delay, in increased level, e.g., expression level, and/or activity of IL-2;
(vi) a delay, e.g., at least 1, 2, 3, 4, 5, 6, 7, 8, 9, 10 hours delay, in increased level, e.g., expression level, and/or activity of IFNγ;
(vii) reduced T cell proliferation kinetics; or
(viii) reduced cytokine storm, e.g., cytokine release syndrome (CRS), e.g., as measured by an assay of Example 3;
(ix) cell killing, e.g., target cell killing,
(x) increased level, e.g., expression level, and/or activity of IL-15; or
(xi) increased Natural Killer (NK) cell proliferation, e.g., expansion, compared to an antibody that binds to: a CD3 molecule, e.g., CD3 epsilon (CD3e) molecule; or a TCR alpha (TCRα) molecule, wherein the anti-TCRβV antibody molecule:
(1) does not bind to TCRβ V12, TCRβ V5-5*01 or TCRβ V5-1*01;
(2) binds to TCRβ V12 with an affinity and/or binding specificity that is less than (e.g., less than about 10%, 20%, 30%, 40%, 50%, 60%, 70%, 80%, 90% or about 2-, 5-, or 10-fold) the affinity and/or binding specificity of the murine mAb Antibody B; and/or
(3) binds to TCRβ V5-5*01 TCRβ V5-1*01or with an affinity and/or binding specificity that is less than (e.g., less than about 10%, 20%, 30%, 40%, 50%, 60%, 70%, 80%, 90% or about 2-, 5-, or 10-fold) the affinity and/or binding specificity of murine Antibody C.

51. The method of any of the preceding claims, wherein binding of the anti-TCRβV antibody molecule to the TCRβV region results in expansion, e.g., at least about 1.1-10 fold expansion (e.g., at least about 1.1, 1.2, 1.3, 1.4, 1.5, 2, 3, 4, 5, 6, 7, 8, 9, or 10 fold expansion), of a population of memory T cells, e.g., T effector memory (T_{EM}) cells, e.g., T_{EM} cells expressing CD45RA (T_{EMRA}) cells, wherein the anti-TCRβV antibody molecule:
(1) does not bind to TCRβ V12, TCRβ V5-5*01 or TCRβ V5-1*01;
(2) binds to TCRβ V12 with an affinity and/or binding specificity that is less than (e.g., less than about 10%, 20%, 30%, 40%, 50%, 60%, 70%, 80%, 90% or about 2-, 5-, or 10-fold) the affinity and/or binding specificity of the murine mAb Antibody B; and/or
(3) binds to TCRβ V5-5*01 TCRβ V5-1*01 or with an affinity and/or binding specificity that is less than (e.g., less than about 10%, 20%, 30%, 40%, 50%, 60%, 70%, 80%, 90% or about 2-, 5-, or 10-fold) the affinity and/or binding specificity of murine Antibody C.

52. The method of any of the preceding claims, wherein binding of the anti-TCRβV antibody molecule to a TCRβV region results in a reduction of at least 2, 5, 10, 20, 50, 100, or 200 fold, or at least 2-200 fold (e.g., 5-150, 10-100, 20-50 fold) in the expression level and or activity of IL-1β as measured by an assay of Example 3.

53. The method of any of the preceding claims, wherein binding of the anti-TCRβV antibody molecule to a TCRβV region results in a reduction of at least 2, 5, 10, 20, 50, 100, 200, 300, 400, 500, 600, 700, 800, 900, or 1000 fold, or at least 2-1000 fold (e.g., 5-900, 10-800, 20-700, 50-600, 100-500, or 200-400 fold) in the expression level and or activity of IL-6 as measured by an assay of Example 3.

54. The method of any of the preceding claims, wherein binding of the anti-TCRβV antibody molecule to a TCRβV region results in a reduction of at least 2, 5, 10, 20, 50, 100, 200, 300, 400, 500, 600, 700, 800, 900, 1000, or 2000 fold, or at least 2-2000 fold (e.g., 5-1000, 10-900, 20-800, 50-700, 100-600, 200-500, or 300-400 fold) in the expression level and or activity of TNFα as measured by an assay of Example 3.

55. The method of any of the preceding claims, wherein binding of the anti-TCRβV antibody molecule to a TCRβV region results in an increase of at least 2, 5, 10, 20, 50, 100, 200, 300, 400, 500, 600, 700, 800, 900, 1000, or 2000 fold, or at least 2-2000 fold (e.g., 5-1000, 10-900, 20-800, 50-700, 100-600, 200-500, or 300-400 fold) in the expression level and or activity of IL-2 as measured by an assay of Example 3.

56. The method of any of the preceding claims, wherein the anti-TCRβV antibody molecule binds to one or more (e.g., all) of the following TCRβV subfamilies:
(i) TCRβ V6 subfamily comprising, e.g., TCRβ V6-4*01, TCRβ V6-4*02, TCRβ V6-9*01, TCRβ V6-8*01, TCRβ V6-5*01, TCRβ V6-6*02, TCRβ V6-6*01, TCRβ V6-2*01, TCRβ V6-3*01 or TCRβ V6-1*01;
(ii) TCRβ V10 subfamily comprising, e.g., TCRβ V10-1*01, TCRβ V10-1*02, TCRβ V10-3*01 or TCRβ V10-2*01;
(iii) TCRβ V12 subfamily comprising, e.g., TCRβ V12-4*01, TCRβ V12-3*01, or TCRβ V12-5*01;
(iv) TCRβ V5 subfamily comprising, e.g., TCRβ V5-5*01, TCRβ V5-6*01, TCRβ V5-4*01, TCRβ V5-8*01, or TCRβ V5-1*01;
(v) TCRβ V7 subfamily comprising, e.g., TCRβ V7-7*01, TCRβ V7-6*01, TCRβ V7-8*02, TCRβ V7-4*01 TCRβ V7-2*02, TCRβ V7-2*03, TCRβ V7-2*01, TCRβ V7-3*01, TCRβ V7-9*03, or TCRβ V7-9*01;
(vi) TCRβ V11 subfamily comprising, e.g., TCRβ V11-1*01, TCRβ V11-2*01 or TCRβ V11-3*01;
(vii) TCRβ V14 subfamily comprising, e.g., TCRβ V14*01;
(viii) TCRβ V16 subfamily comprising, e.g., TCRβ V16*01;
(ix) TCRβ V18 subfamily comprising, e.g., TCRβ V18*01;
(x) TCRβ V9 subfamily comprising, e.g., TCRβ V9*01 or TCRβ V9*02;
(xi) TCRβ V13 subfamily comprising, e.g., TCRβ V13*01;
(xii) TCRβ V4 subfamily comprising, e.g., TCRβ V4-2*01, TCRβ V4-3*01, or TCRβ V4-1*01;
(xiii) TCRβ V3 subfamily comprising, e.g., TCRβ V3-1*01;
(xiv) TCRβ V2 subfamily comprising, e.g., TCRβ V2*01;
(xv) TCRβ V15 subfamily comprising, e.g., TCRβ V15*01;
(xvi) TCRβ V30 subfamily comprising, e.g., TCRβ V30*01, or TCRβ V30*02;
(xvii) TCRβ V19 subfamily comprising, e.g., TCRβ V19*01, or TCRβ V19*02;
(xviii) TCRβ V27 subfamily comprising, e.g., TCRβ V27*01;
(xix) TCRβ V28 subfamily comprising, e.g., TCRβ V28*01;
(xx) TCRβ V24 subfamily comprising, e.g., TCRβ V24-1*01;
(xxi) TCRβ V20 subfamily comprising, e.g., TCRβ V20-1*01, or TCRβ V20-1*02;
(xxii) TCRβ V25 subfamily comprising, e.g., TCRβ V25-1*01;
(xxiii) TCRβ V29 subfamily comprising, e.g., TCRβ V29-1*01; or
(xxiv) TCRβ V23 subfamily comprising, e.g., TCRβ V23-1.

57. The method of any of the preceding claims, wherein the anti-TCRβV antibody molecule binds to one or more (e.g., all) of the following TCRβV subfamilies:
(i) TCRβ V6 subfamily comprising, e.g., TCRβ V6-5*01;
(ii) TCRβ V10 subfamily comprising, e.g., TCRβ V10-1*01, TCRβ V10-1*02, TCRβ V10-3*01 or TCRβ V10-2*01;
(iii) TCRβ V12 subfamily comprising, e.g., TCRβ V12-4*01, TCRβ V12-3*01, or TCRβ V12-5*01;
(iv) TCRβ V5 subfamily comprising, e.g., TCRβ V5-6*01;
(v) TCRβ V7 subfamily comprising, e.g., TCRβ V7-7*01, TCRβ V7-6*01, TCRβ V7-8*02, TCRβ V7-4*01 TCRβ V7-2*02, TCRβ V7-2*03, TCRβ V7-2*01, TCRβ V7-3*01, TCRβ V7-9*03, or TCRβ V7-9*01;
(vi) TCRβ V14 subfamily comprising, e.g., TCRβ V14*01;
(vii) TCRβ V9 subfamily comprising, e.g., TCRβ V9*01 or TCRβ V9*02;
(viii) TCRβ V13 subfamily comprising, e.g., TCRβ V13*01;
(ix) TCRβ V19 subfamily comprising, e.g., TCRβ V19*01, or TCRβ V19*02; or (x) TCRβ V23 subfamily comprising, e.g., TCRβ V23-1.

58. The method of any of the preceding claims, wherein the infectious disease is SIV and the anti-TCRβV antibody molecule binds to the TCRβ V6 subfamily, e.g., comprising TCRβ V6-5*01.

59. The method of claim 58, wherein the subject has a higher, e.g., increased, level or activity of a TCRβ V6 subfamily, e.g., comprising TCRβ V6-5*01.

60. The method of any of the preceding claims, wherein the infectious disease is HCMV and the anti-TCRβV antibody molecule binds to the TCRβ V6 subfamily, e.g., comprising TCRβ V6-5*01.

61. The method of claim 60, wherein the subject has a higher, e.g., increased, level or activity of a TCRβ V6 subfamily, e.g., comprising TCRβ V6-5*01.

62. The method of any of claims 58-61, wherein the anti-TCRβV antibody molecule comprises:
(1) a heavy chain complementarity determining region (HC CDR1), a HC CDR2 and/or a HC CDR3 of SEQ ID NO: 3, SEQ ID NO: 4, and/or SEQ ID NO: 5; and/or
(2) a light chain complementarity determining region 1 (LC CDR1), a LC CDR2, and/or a LC CDR3 of SEQ ID NO: 6, SEQ ID NO: 7, and/or SEQ ID NO: 8.

63. The method of any of claims 58-61, wherein the anti-TCRβV antibody molecule comprises:
(1) a heavy chain complementarity determining region (HC CDR1), a HC CDR2 and/or a HC CDR3 of SEQ ID NO: 45, SEQ ID NO: 46, and/or SEQ ID NO: 47; and/or
(2) a light chain complementarity determining region 1 (LC CDR1), a LC CDR2, and/or a LC CDR3 of SEQ ID NO: 51, SEQ ID NO: 52, and/or SEQ ID NO: 53.

64. The method of any of claims 58-61, wherein the anti-TCRβV antibody molecule comprises:
(1) a heavy chain complementarity determining region (HC CDR1), a HC CDR2 and/or a HC CDR3 of SEQ ID NO: 48, SEQ ID NO: 49, and/or SEQ ID NO: 50; and/or
(2) a light chain complementarity determining region 1 (LC CDR1), a LC CDR2, and/or a LC CDR3 of SEQ ID NO: 54, SEQ ID NO: 55, and/or SEQ ID NO: 56.

65. The method of any of claims 58-64, wherein the anti-TCRβV antibody molecule comprises a VH having at least 85% (e.g., at least 85%, 90%, 95%, 96%, 97%, 98%, 99%, or 100%) sequence identity to SEQ ID NO: 9.

66. The method of any of claims 58-65, wherein the anti-TCRβV antibody molecule comprises a VL having at least 85% (e.g., at least 85%, 90%, 95%, 96%, 97%, 98%, 99%, or 100%) sequence identity to SEQ ID NO: 10.

67. The method of any of claims 58-64, wherein the anti-TCRβV antibody molecule comprises a VH having at least 85% (e.g., at least 85%, 90%, 95%, 96%, 97%, 98%, 99%, or 100%) sequence identity to SEQ ID NO: 9 and a VL having at least X % sequence identity to SEQ ID NO: 10.

68. The method of any of claims 58-67, wherein the anti-TCRβV antibody molecule comprises a heavy chain having at least 85% (e.g., at least 85%, 90%, 95%, 96%, 97%, 98%, 99%, or 100%) sequence identity to SEQ ID NO: 69 and a light chain having at least 85% (e.g., at least 85%, 90%, 95%, 96%, 97%, 98%, 99%, or 100%) sequence identity to SEQ ID NO: 72.

69. The method of any of the preceding claims, wherein the infectious disease is EBV and the anti-TCRβV antibody molecule binds to the TCRβ V10 subfamily, e.g., comprising TCRβ V10-1*01, TCRβ V10-1*02, TCRβ V10-3*01 or TCRβ V10-2*01.

70. The method of claim 69, wherein the antigen is BZLF1(52-64).

71. The method of claim 69 or 70, wherein the MHC restriction is HLA-B*3508.

72. The method of any of claims 69-71, wherein the subject has a higher, e.g., increased, level or activity of a TCRβ V10 subfamily, e.g., comprising TCRβ V10-1*01, TCRβ V10-1*02, TCRβ V10-3*01 or TCRβ V10-2*01.

73. The method of any of the preceding claims, wherein the infectious disease is malaria and the anti-TCRβV antibody molecule binds to the TCRβ V12 subfamily, e.g., comprising TCRβ V12-4*01, TCRβ V12-3*01, or TCRβ V12-5*01.

74. The method of claim 73, wherein the subject has a higher, e.g., increased, level or activity of a TCRβ V12 subfamily, e.g., comprising TCRβ V12-4*01, TCRβ V12-3*01, or TCRβ V12-5*01.

75. The method of any of the preceding claims, wherein the infectious disease is tuberculosis and the anti-TCRβV antibody molecule binds to the TCRβ V12 subfamily, e.g., comprising TCRβ V12-4*01, TCRβ V12-3*01, or TCRβ V12-5*01.

76. The method of claim 75, wherein the subject has a higher, e.g., increased, level or activity of a TCRβ V12 subfamily, e.g., comprising TCRβ V12-4*01, TCRβ V12-3*01, or TCRβ V12-5*01.

77. The method of any of the preceding claims, wherein the infectious disease is HCMV and the anti-TCRβV antibody molecule binds to the TCRβ V12 subfamily, e.g., comprising TCRβ V12-4*01.

78. The method of claim 77, wherein the subject has a higher, e.g., increased, level or activity of a TCRβ V12 subfamily, e.g., comprising TCRβ V12-4*01.

79. The method of any of claims 73-78, wherein the anti-TCRβV antibody molecule comprises:
(1) a heavy chain complementarity determining region (HC CDR1), a HC CDR2 and/or a HC CDR3 of SEQ ID NO: 17, SEQ ID NO: 18, and/or SEQ ID NO: 19; and/or
(2) a light chain complementarity determining region 1 (LC CDR1), a LC CDR2, and/or a LC CDR3 of SEQ ID NO: 20, SEQ ID NO: 21, and/or SEQ ID NO: 22.

80. The method of any of claims 73-78, wherein the anti-TCRβV antibody molecule comprises:
(1) a heavy chain complementarity determining region (HC CDR1), a HC CDR2 and/or a HC CDR3 of SEQ ID NO: 57, SEQ ID NO: 58, and/or SEQ ID NO: 59; and/or (2) a light chain complementarity determining region 1 (LC CDR1), a LC CDR2, and/or a LC CDR3 of SEQ ID NO: 63, SEQ ID NO: 64, and/or SEQ ID NO: 65.

81. The method of any of claims 73-78, wherein the anti-TCRβV antibody molecule comprises:
(1) a heavy chain complementarity determining region (HC CDR1), a HC CDR2 and/or a HC CDR3 of SEQ ID NO: 60, SEQ ID NO: 61, and/or SEQ ID NO: 62; and/or (2) a light chain complementarity determining region 1 (LC CDR1), a LC CDR2, and/or a LC CDR3 of SEQ ID NO: 66, SEQ ID NO: 67, and/or SEQ ID NO: 68.

82. The method of any of claims 73-81, wherein the anti-TCRβV antibody molecule comprises a VH having at least 85% (e.g., at least 85%, 90%, 95%, 96%, 97%, 98%, 99%, or 100%) sequence identity to SEQ ID NO: 15.

83. The method of any of claims 73-82, wherein the anti-TCRβV antibody molecule comprises a VL having at least 85% (e.g., at least 85%, 90%, 95%, 96%, 97%, 98%, 99%, or 100%) sequence identity to SEQ ID NO: 16, optionally wherein the anti-TCRβV antibody molecule comprises a VH having at least 85% (e.g., at least 85%, 90%, 95%, 96%, 97%, 98%, 99%, or 100%) sequence identity to SEQ ID NO: 15 and a VL having at least 85% (e.g., at least 85%, 90%, 95%, 96%, 97%, 98%, 99%, or 100%) sequence identity to SEQ ID NO: 16.

84. The method of any of claims 73-81, wherein the anti-TCRβV antibody molecule comprises a VH having at least 85% (e.g., at least 85%, 90%, 95%, 96%, 97%, 98%, 99%, or 100%) sequence identity to SEQ ID NO: 23.

85. The method of any of claims 73-81, wherein the anti-TCRβV antibody molecule comprises a VH having at least 85% (e.g., at least 85%, 90%, 95%, 96%, 97%, 98%, 99%, or 100%) sequence identity to SEQ ID NO: 24.

86. The method of any of claims 73-81, wherein the anti-TCRβV antibody molecule comprises a VH having at least 85% (e.g., at least 85%, 90%, 95%, 96%, 97%, 98%, 99%, or 100%) sequence identity to SEQ ID NO: 25.

87. The method of any of claims 73-86, wherein the anti-TCRβV antibody molecule comprises a VL having at least 85% (e.g., at least 85%, 90%, 95%, 96%, 97%, 98%, 99%, or 100%) sequence identity to SEQ ID NO: 26.

88. The method of any of claims 73-86, wherein the anti-TCRβV antibody molecule comprises a VL having at least 85% (e.g., at least 85%, 90%, 95%, 96%, 97%, 98%, 99%, or 100%) sequence identity to SEQ ID NO: 27.

89. The method of any of claims 73-86, wherein the anti-TCRβV antibody molecule comprises a VL having at least 85% (e.g., at least 85%, 90%, 95%, 96%, 97%, 98%, 99%, or 100%) sequence identity to SEQ ID NO: 28.

90. The method of any of claims 73-86, wherein the anti-TCRβV antibody molecule comprises a VL having at least 85% (e.g., at least 85%, 90%, 95%, 96%, 97%, 98%, 99%, or 100%) sequence identity to SEQ ID NO: 29.

91. The method of any of claims 73-86, wherein the anti-TCRβV antibody molecule comprises a VL having at least 85% (e.g., at least 85%, 90%, 95%, 96%, 97%, 98%, 99%, or 100%) sequence identity to SEQ ID NO: 30.

92. The method of any of the preceding claims, wherein the infectious disease is HIV and the anti-TCRβV antibody molecule binds to the TCRβ V5 subfamily, e.g., comprising TCRβ V5-6*01.

93. The method of claim 92, wherein the antigen is Gag p17 (77-85).

94. The method of claim 92 or 93, wherein the MHC restriction is HLA-B*0801.

95. The method of any of claims 92-94, wherein the subject has a higher, e.g., increased, level or activity of a TCRβ V5 subfamily, e.g., comprising TCRβ V5-6*01.

96. The method of any of the preceding claims, wherein the infectious disease is EBV and the anti-TCRβV antibody molecule binds to the TCRβ V7 subfamily, e.g., comprising TCRβ V7-7*01, TCRβ V7-6*01, TCRβ V7-8*02, TCRβ V7-4*01, TCRβ V7-2*02, TCRβ V7-2*03, TCRβ V7-2*01, TCRβ V7-3*01, TCRβ V7-9*03, or TCRβ V7-9*01.

97. The method of claim 96, wherein the antigen is EBNA3(339-347).

98. The method of claim 96 or 97, wherein the MHC restriction is HLA-B*0801.

99. The method of any of claims 96-98, wherein the subject has a higher, e.g., increased, level or activity of a TCRβ V7 subfamily, e.g., comprising TCRβ V7-7*01, TCRβ V7-6*01, TCRβ V7 -8*02, TCRβ V7-4*01, TCRβ V7-2*02, TCRβ V7-2*03, TCRβ V7-2*01, TCRβ V7-3*01, TCRβ V7-9*03, or TCRβ V7-9*01.

100. The method of any of the preceding claims, wherein the infectious disease is SIV and the anti-TCRβV antibody molecule binds to the TCRβ V14 subfamily, e.g., comprising TCRβ V14*01.

101. The method of claim 100, wherein the subject has a higher, e.g., increased, level or activity of a TCRβ V14 subfamily, e.g., comprising TCRβ V14*01.

102. The method of any of the preceding claims, wherein the infectious disease is EBV and the anti-TCRβV antibody molecule binds to the TCRβ V9 subfamily, e.g., comprising TCRβ V9*01 or TCRβ V9*02.

103. The method of claim 102, wherein the antigen is EBNA1(407-417).

104. The method of claim 102 or 103, wherein the MHC restriction is HLA-B*3508 or HLA-B*3501.

105. The method of any of claims 102-104, wherein the subject has a higher, e.g., increased, level or activity of a TCRβ V9 subfamily, e.g., comprising TCRβ V9*01 or TCRβ V9*02.

106. The method of any of the preceding claims, wherein the infectious disease is SIV and the anti-TCRβV antibody molecule binds to the TCRβ V13 subfamily, e.g., comprising TCRβ V13*01.

107. The method of claim 106, wherein the subject has a higher, e.g., increased, level or activity of a TCRβ V13 subfamily, e.g., comprising TCRβ V13*01.

108. The method of any of the preceding claims, wherein the infectious disease is influenza and the anti-TCRβ V antibody molecule binds to the TCRβ V19 subfamily, e.g., comprising TCRβ V19*01, or TCRβ V19*02.

109. The method of claim 108, wherein the antigen is Matrix protein (58-66).

110. The method of claim 108 or 109, wherein the MHC restriction is HLA-A2.

111. The method of any of claims 108-110, wherein the subject has a higher, e.g., increased, level or activity of a TCRβ V19 subfamily, e.g., comprising TCRβ V19*01, or TCRβ V19*02.

112. The method of any of the preceding claims, wherein the infectious disease is HIV and the anti-TCRβ V antibody molecule binds to the TCRα V19 subfamily, e.g., comprising TCRβ V19*01, or TCRβ V19*02.

113. The method of claim 112, wherein the subject has a higher, e.g., increased, level or activity of a TCRβ V19 subfamily, e.g., comprising TCRβ V19*01, or TCRβ V19*02.

114. The method of any of the preceding claims, wherein the infectious disease is HIV and the anti-TCRβ V antibody molecule binds to the TCRβ V23 subfamily, e.g., comprising TCRβ V23-1.

115. The method of claim 114, wherein the subject has a higher, e.g., increased, level or activity of a TCRβ V23 subfamily, e.g., comprising TCRβ V23-1.

116. The method of any of the preceding claims, wherein the anti-TCRβ V antibody molecule:
(i) binds specifically to an epitope on TCRβ V, e.g., the same or similar epitope as the epitope recognized by an anti-TCRβ V antibody molecule as described herein, e.g., a second anti-TCRβ V antibody molecule;
(ii) shows the same or similar binding affinity or specificity, or both, as an anti-TCRβ V antibody molecule as described herein, e.g., a second anti-TCRβ V antibody molecule;
(iii) inhibits, e.g., competitively inhibits, the binding of an anti-TCRβ V antibody molecule as described herein, e.g., a second anti-TCRβ V antibody molecule;
(iv) binds the same or an overlapping epitope with an anti-TCRβ V antibody molecule as described herein, e.g., a second anti-TCRβ V antibody molecule; or
(v) competes for binding, and/or binds the same epitope, with an anti-TCRβ V antibody molecule as described herein, e.g., a second anti-TCRβ V antibody molecule.

117. The method of any of the preceding claims, wherein the anti-TCRβV antibody molecule comprises an antigen binding domain comprising:
(i) a heavy chain complementarity determining region 1 (HC CDR1), a heavy chain complementarity determining region 2 (HC CDR2) and/or a heavy chain complementarity determining region 3 (HC CDR3) of SEQ ID NO: 1 or SEQ ID NO: 9; or
(ii) a light chain complementarity determining region 1 (LC CDR1), a light chain complementarity determining region 2 (LC CDR2), and/or a light chain complementarity determining region 3 (LC CDR3) of SEQ ID NO: 2, SEQ ID NO: 10, or SEQ ID NO: 11.

118. The method of any of the preceding claims, wherein the anti-TCRβV antibody molecule comprises an antigen binding domain comprising a light chain variable region (VL) comprising one, two or all (e.g., three) of a LC CDR1, a LC CDR2 and a LC CDR3 of SEQ ID NO: 2, SEQ ID NO: 10, or SEQ ID NO: 11.

119. The method of any of the preceding claims, wherein the anti-TCRβV antibody molecule comprises an antigen binding domain comprising a heavy chain variable region (VH) comprising one, two or all (e.g., three) of a HC CDR1, a HC CDR2 and a HC CDR3 of SEQ ID NO:1 or SEQ ID NO: 9.

120. The method of any of the preceding claims, wherein the anti-TCRβV antibody molecule comprises an antigen binding domain comprising:
(i) a VL comprising: a LC CDR1 amino acid sequence of SEQ ID NO: 6 (or an amino acid sequence with not more than 1, 2, 3 or 4 modifications, e.g., substitutions, additions or deletions thereof), a LC CDR2 amino acid sequence of SEQ ID NO:7 (or an amino acid sequence with not more than 1, 2, 3 or 4 modifications, e.g., substitutions, additions or deletions thereof), and/or a LC CDR3 amino acid sequence of SEQ ID NO:8 (or an amino acid sequence with not more than 1, 2, 3 or 4 modifications, e.g., substitutions, additions or deletions thereof); and/or
(ii) a VH comprising: a HC CDR1 amino acid sequence of SEQ ID NO: 3 (or an amino acid sequence with not more than 1, 2, 3 or 4 modifications, e.g., substitutions, additions or deletions thereof), a HC CDR2 amino acid sequence of SEQ ID NO:4 (or an amino acid sequence with not more than 1, 2, 3 or 4 modifications, e.g., substitutions, additions or deletions thereof), and/or a HC CDR3 amino acid sequence of SEQ ID NO:5 (or an amino acid sequence with not more than 1, 2, 3 or 4 modifications, e.g., substitutions, additions or deletions thereof).

121. The method of any of the preceding claims, wherein the anti-TCRβV antibody molecule comprises an antigen binding domain comprising:
a variable heavy chain (VH) of SEQ ID NO: 9, or a sequence having at least about 85%, 90%, 95%, or 99% sequence identity thereto; and/or
a variable light chain (VL) of SEQ ID NO: 10 or SEQ ID NO: 11, or a sequence having at least about 85%, 90%, 95%, or 99% sequence identity thereto.

122. The method of any of the preceding claims, wherein the anti-TCRβV antibody molecule comprises an antigen binding domain comprising the VH amino acid sequence of SEQ ID NO: 9 and the VL amino acid sequence of SEQ ID NO: 10.

123. The method of any of the preceding claims, wherein the anti-TCRβV antibody molecule comprises an antigen binding domain comprising the VH amino acid sequence of SEQ ID NO: 9 and the VL amino acid sequence of SEQ ID NO: 11.

124. The method of any of the preceding claims, wherein the anti-TCRβV antibody molecule comprises an antigen binding domain comprising a single chain Fv (scFv) or a Fab.

125. The method of any of the preceding claims, wherein the anti-TCRβV antibody molecule binds to a conformational or a linear epitope on the T cell.

126. The method of any of the preceding claims, wherein the anti-TCRβV antibody molecule is a full antibody (e.g., an antibody that includes at least one, and preferably two, complete heavy chains, and at least one, and preferably two, complete light chains), or an antigen-binding fragment (e.g., a Fab, F(ab′)₂, Fv, a single chain Fv fragment, a single domain antibody, a diabody (dAb), a bivalent antibody, or bispecific antibody or fragment thereof, a single domain variant thereof, or a camelid antibody).

127. The method of claim 126, wherein the anti-TCRβV antibody molecule comprises a heavy chain constant region chosen from IgG1, IgG2, IgG3, or IgG4, or a fragment thereof.

128. The method of claim 126 or 127, wherein the anti-TCRβV antibody molecule comprises a light chain constant region chosen from the light chain constant regions of kappa or lambda, or a fragment thereof.

129. A method of making, e.g., producing or manufacturing, the anti-TCRβV antibody molecule of the method of any of the preceding claims, comprising culturing a host cell comprising a nucleic acid encoding the anti-TCRβV antibody molecule, under suitable conditions, e.g., conditions suitable expression of the anti- TCRβV antibody molecule.

130. A pharmaceutical composition comprising the anti-TCRβV antibody molecule of the method of any of the preceding claims, and a pharmaceutically acceptable carrier, excipient, or stabilizer.

131. The method of any of claims 1-128, wherein the expansion occurs in vivo or ex vivo (e.g., in vitro).

132. The method of any of claim 1-128 or 131, wherein the T cell population comprises a T cell, a Natural Killer cell, a B cell, or a myeloid cell.

133. The method of any of claim 1-128, 131, or 132, wherein the T cell population comprises a CD4 T cell, a CD8 T cell, e.g., an effector T cell or a memory T cell (e.g., a memory effector T cell (e.g., T_{EM} cell, e.g., T_{EMRA} cell), or a combination thereof.

134. The method of any of claim 1-128 or 131-133, wherein the T cell population is obtained from a healthy subject.

135. The method of any of claim 1-128 or 131-134, wherein the T cell population is obtained from a subject (e.g., from an apheresis sample from the subject) having a disease, e.g., an infectious disease, e.g., as described herein.

136. The method of any of claim 1-128 or 131-135, wherein the method results in an expansion of at least 1.1-10 fold (e.g., at least 1.1, 1.2, 1.3, 1.4, 1.5, 2, 3, 4, 5, 6, 7, 8, 9, or 10 fold expansion).

137. The method of any of claim 1-128 or 131-136, further comprising contacting the population of cells with an agent that promotes, e.g., increases, immune cell (e.g., T cell) expansion.

138. The method of any of claim 1-128 or 131-137, further comprising contacting the population of cells with an additional therapeutic agent.

139. The method of claim 138, wherein the additional therapeutic agent targets the infectious disease.

140. The method of any of claim 1-128 or 131-139, further comprising contacting the population of cells with a non-dividing population of cells, e.g., feeder cells, e.g., irradiated allogenic human PBMCs.

141. The method of any of claim 1-128 or 131-140, wherein the population of cells is expanded in an appropriate media (e.g., media described herein) that includes one or more cytokines, e.g., IL-2, IL-7, IL-15, or a combination thereof.

142. The method of any of claim 1-128 or 131-141, wherein the population of cells is expanded for a period of at least about 4 hours, 6 hours, 10 hours, 12 hours, 15 hours, 18 hours, 20 hours, or 22 hours, or for at least 1, 2, 3, 4, 5, 6, 7, 8, 9, 10, 11, 12, 13, 14, 15, 1,6 17, 18, 19, 20 or 21 days, or for at least about 1 week, 2 weeks, 3 weeks, 4 weeks, 5 weeks, 6 weeks, 7 weeks or 8 weeks.

143. The method of any of claim 1-128 or 131-142, wherein expansion of the population of T cells is compared to expansion of a similar population of cells with an antibody that binds to: a CD3 molecule, e.g., CD3 epsilon (CD3e) molecule; or a TCR alpha (TCRα) molecule.

144. The method of any of claim 1-128 or 131-143, wherein expansion of the population of T cells is compared to expansion of a similar population of cells not contacted with the anti-TCRβV antibody molecule.

145. The method of any of claim 1-128 or 131-144, wherein expansion of the population of T cells, e.g., memory effector T cells, e.g., T_{EM} cells, e.g., T_{EMRA} cells, is compared to expansion of a similar population of cells with an antibody that binds to: a CD3 molecule, e.g., CD3 epsilon (CD3e) molecule; or a TCR alpha (TCRα) molecule.

146. The method of any of claim 1-128 or 131-145, wherein the population of expanded T cells, e.g., expanded T effector memory cells, comprises cells which:
(i) have a detectable level of CD45RA, e.g., express or re-express CD45RA;
(ii) have low or no expression of CCR7; and/or
(iii) have a detectable level of CD95, e.g., express CD95,
e.g., a population of CD45RA+, CCR7-, CD95+T cells, optionally wherein the T cells comprise CD3+, CD4+or CD8+T cells.

147. The method of any of claim 1-128 or 131-146, wherein the antibody molecule, e.g., humanized antibody molecule, which binds, e.g., specifically binds, to the TCRβV region (the anti-TCRβV antibody molecule) is chosen from:
(A) a humanized antibody molecule which binds, e.g., specifically binds, to a T cell receptor beta variable chain (TCRβV) region chosen from TCRβV V5-6, TCRβV V6-5, TCRβV V7, TCRβV V9, TCRβV V10, TCRβV V12 (e.g., TCRβV V12-4), TCRβV V13, TCRβV V14, TCRβV V19, TCRβV V23-1, or a subfamily member thereof (e.g., as listed in Table 1 or Table 2);
(B) a humanized antibody molecule which:
(i) binds specifically to an epitope on TCRβV, e.g., the same or similar epitope as the epitope recognized by a second anti-TCRβV antibody molecule;
(ii) shows the same or similar binding affinity or specificity, or both, as a second anti-TCRβV antibody molecule;
(iii) inhibits, e.g., competitively inhibits, the binding of a second anti-TCRβV antibody molecule;
(iv) binds the same or an overlapping epitope with an anti-TCRβV antibody molecule as a second anti-TCRβV antibody molecule; or
(v) competes for binding, and/or binds the same epitope, with a second anti-TCRβV antibody molecule,
wherein the second anti-TCRβV antibody molecule comprises an antigen binding domain comprising:
(1) a heavy chain complementarity determining region (HC CDR1), a HC CDR2 and/or a HC CDR3 of SEQ ID NO: 3, SEQ ID NO: 4, and/or SEQ ID NO: 5, and/or
(2) a light chain complementarity determining region 1 (LC CDR1), a LC CDR2, and/or a LC CDR3 of SEQ ID NO: 6, SEQ ID NO: 7, and/or SEQ ID NO: 8;
(1) a heavy chain complementarity determining region (HC CDR1), a HC CDR2 and/or a HC CDR3 of SEQ ID NO: 45, SEQ ID NO: 46, and/or SEQ ID NO: 47, and/or
(2) a light chain complementarity determining region 1 (LC CDR1), a LC CDR2, and/or a LC CDR3 of SEQ ID NO: 51, SEQ ID NO: 52, and/or SEQ ID NO: 53;
(1) a heavy chain complementarity determining region (HC CDR1), a HC CDR2 and/or a HC CDR3 of SEQ ID NO: 48, SEQ ID NO: 49, and/or SEQ ID NO: 50, and/or
(2) a light chain complementarity determining region 1 (LC CDR1), a LC CDR2, and/or a LC CDR3 of SEQ ID NO: 54, SEQ ID NO: 55, and/or SEQ ID NO: 56;
(1) a heavy chain complementarity determining region (HC CDR1), a HC CDR2 and/or a HC CDR3 of SEQ ID NO: 17, SEQ ID NO: 18, and/or SEQ ID NO: 19, and/or
(2) a light chain complementarity determining region 1 (LC CDR1), a LC CDR2, and/or a LC CDR3 of SEQ ID NO: 20, SEQ ID NO: 21, and/or SEQ ID NO: 22;
(1) a heavy chain complementarity determining region (HC CDR1), a HC CDR2 and/or a HC CDR3 of SEQ ID NO: 57, SEQ ID NO: 58, and/or SEQ ID NO: 59, and/or
(2) a light chain complementarity determining region 1 (LC CDR1), a LC CDR2, and/or a LC CDR3 of SEQ ID NO: 63, SEQ ID NO: 64, and/or SEQ ID NO: 65;
(1) a heavy chain complementarity determining region (HC CDR1), a HC CDR2 and/or a HC CDR3 of SEQ ID NO: 60, SEQ ID NO: 61, and/or SEQ ID NO: 62, and/or
(2) a light chain complementarity determining region 1 (LC CDR1), a LC CDR2, and/or a LC CDR3 of SEQ ID NO: 66, SEQ ID NO: 67, and/or SEQ ID NO: 68; or
(1) a heavy chain complementarity determining region (HC CDR1), a HC CDR2 and/or a HC CDR3 of SEQ ID NO: 15, SEQ ID NO: 23, SEQ ID NO: 24, or SEQ ID NO: 25, and/or
(2) a light chain complementarity determining region 1 (LC CDR1), a LC CDR2, and/or a LC CDR3 of SEQ ID NO: 16, SEQ ID NO: 26, SEQ ID NO: 27, SEQ ID NO: 28, SEQ ID NO: 29, or SEQ ID NO: 30; or
(C) a humanized antibody molecule which binds, e.g., specifically binds, to a T cell receptor beta variable chain (TCRβV) region, wherein the anti-TCRβV antibody molecule comprises an antigen binding domain comprising:
(1) a heavy chain complementarity determining region (HC CDR1), a HC CDR2 and/or a HC CDR3 of SEQ ID NO: 3, SEQ ID NO: 4, and/or SEQ ID NO: 5, and/or
(2) a light chain complementarity determining region 1 (LC CDR1), a LC CDR2, and/or a LC CDR3 of SEQ ID NO: 6, SEQ ID NO: 7, and/or SEQ ID NO: 8;
(1) a heavy chain complementarity determining region (HC CDR1), a HC CDR2 and/or a HC CDR3 of SEQ ID NO: 45, SEQ ID NO: 46, and/or SEQ ID NO: 47, and/or
(2) a light chain complementarity determining region 1 (LC CDR1), a LC CDR2, and/or a LC CDR3 of SEQ ID NO: 51, SEQ ID NO: 52, and/or SEQ ID NO: 53;
(1) a heavy chain complementarity determining region (HC CDR1), a HC CDR2 and/or a HC CDR3 of SEQ ID NO: 48, SEQ ID NO: 49, and/or SEQ ID NO: 50, and/or
(2) a light chain complementarity determining region 1 (LC CDR1), a LC CDR2, and/or a LC CDR3 of SEQ ID NO: 54, SEQ ID NO: 55, and/or SEQ ID NO: 56;
(1) a heavy chain complementarity determining region (HC CDR1), a HC CDR2 and/or a HC CDR3 of SEQ ID NO: 17, SEQ ID NO: 18, and/or SEQ ID NO: 19, and/or
(2) a light chain complementarity determining region 1 (LC CDR1), a LC CDR2, and/or a LC CDR3 of SEQ ID NO: 20, SEQ ID NO: 21, and/or SEQ ID NO: 22;
(1) a heavy chain complementarity determining region (HC CDR1), a HC CDR2 and/or a HC CDR3 of SEQ ID NO: 57, SEQ ID NO: 58, and/or SEQ ID NO: 59, and/or
(2) a light chain complementarity determining region 1 (LC CDR1), a LC CDR2, and/or a LC CDR3 of SEQ ID NO: 63, SEQ ID NO: 64, and/or SEQ ID NO: 65;
(1) a heavy chain complementarity determining region (HC CDR1), a HC CDR2 and/or a HC CDR3 of SEQ ID NO: 60, SEQ ID NO: 61, and/or SEQ ID NO: 62, and/or
(2) a light chain complementarity determining region 1 (LC CDR1), a LC CDR2, and/or a LC CDR3 of SEQ ID NO: 66, SEQ ID NO: 67, and/or SEQ ID NO: 68; or
(i) a heavy chain complementarity determining region (HC CDR1), a HC CDR2 and/or a HC CDR3 of SEQ ID NO: 15, SEQ ID NO: 23, SEQ ID NO: 24, or SEQ ID NO: 25; and/or
(ii) a light chain complementarity determining region 1 (LC CDR1), a LC CDR2, and/or a LC CDR3 of SEQ ID NO: 16, SEQ ID NO: 26, SEQ ID NO: 27, SEQ ID NO:
28, SEQ ID NO: 29, or SEQ ID NO: 30.

148. The method of any of claim 1-128 or 131-147, wherein the anti-TCRβV antibody molecule comprises an antigen binding domain comprising a light chain variable region (VL) comprising one, two or all of a LC CDR1, a LC CDR2 and a LC CDR3 of SEQ ID NO: 16, SEQ ID NO: 26, SEQ ID NO: 27, SEQ ID NO: 28, SEQ ID NO: 29, or SEQ ID NO: 30.

149. The method of any of claim 1-128 or 131-148, wherein the anti-TCRβV antibody molecule comprises an antigen binding domain comprising a heavy chain variable region (VH) comprising one, two or all of a HC CDR1, a HC CDR2 and a HC CDR3 of SEQ ID NO: 15, SEQ ID NO: 23, SEQ ID NO: 24, or SEQ ID NO: 25.

150. The method of any of claim 1-128 or 131-149, wherein the anti-TCRβV antibody molecule comprises an antigen binding domain comprising:
(i) a VL comprising: a LC CDR1 amino acid sequence of SEQ ID NO: 20 (or an amino acid sequence with not more than 1, 2, 3 or 4 modifications, e.g., substitutions, additions or deletions thereof), a LC CDR2 amino acid sequence of SEQ ID NO:21 (or an amino acid sequence with not more than 1, 2, 3 or 4 modifications, e.g., substitutions, additions or deletions thereof), and/or a LC CDR3 amino acid sequence of SEQ ID NO:22 (or an amino acid sequence with not more than 1, 2, 3 or 4 modifications, e.g., substitutions, additions or deletions thereof); and/or
(ii) a VH comprising: a HC CDR1 amino acid sequence of SEQ ID NO: 17 (or an amino acid sequence with not more than 1, 2, 3 or 4 modifications, e.g., substitutions, additions or deletions thereof), a HC CDR2 amino acid sequence of SEQ ID NO:18 (or an amino acid sequence with not more than 1, 2, 3 or 4 modifications, e.g., substitutions, additions or deletions thereof), and/or a HC CDR3 amino acid sequence of SEQ ID NO:19 (or an amino acid sequence with not more than 1, 2, 3 or 4 modifications, e.g., substitutions, additions or deletions thereof).

151. The method of any of claim 1-128 or 131-150, wherein the anti-TCRβV antibody molecule comprises an antigen binding domain comprising:
a variable heavy chain (VH) of SEQ ID NO: 23, SEQ ID NO: 24, or SEQ ID NO: 25, or a sequence having at least about 85%, 90%, 95%, or 99% sequence identity thereto; and/or
a variable light chain (VL) of SEQ ID NO: 26, SEQ ID NO: 27, SEQ ID NO: 28, SEQ ID NO: 29, or SEQ ID NO: 30, or a sequence having at least about 85%, 90%, 95%, or 99% sequence identity thereto.

152. The method of any of claim 1-128 or 131-151, wherein the anti-TCRβV antibody molecule comprises a light chain comprising a framework region, e.g., framework region 1 (FR1), comprising one, two or all (e.g., three) of:
(i) an Aspartic Acid at position 1, e.g., a substitution at position 1 according to Kabat numbering, e.g., a Alanine to Aspartic Acid substitution; or
(ii) an Asparagine at position 2, e.g., a substitution at position 2 according to Kabat numbering, e.g., a Isoleucine to Asparagine, a Serine to Asparagine, or a Tyrosine to Asparagine substitution; or
(iii) a Leucine at position 4, e.g., a substitution at position 4 according to Kabat numbering, e.g., a Methionine to Leucine substitution,
wherein the substitution is relative to a human germline light chain framework region sequence.

153. The method of any of claim 1-128 or 131-152, wherein the anti-TCRβV antibody molecule comprises a light chain comprising a framework region, e.g., framework region 3 (FR3), comprising one, two or all (e.g., three) of:
(i) a Glycine at position 66, e.g., a substitution at position 66 according to Kabat numbering, e.g., a Lysine to Glycine, or a Serine to Glycine substitution; or
(ii) an Asparagine at position 69, e.g., a substitution at position 69 according to Kabat numbering, e.g., a Threonine to Asparagine substitution; or
(iii) a Tyrosine at position 71, e.g., a substitution at position 71 according to Kabat numbering, e.g., a Phenylalanine to Tyrosine, or Alanine to Tyrosine substitution,
wherein the substitution is relative to a human germline light chain framework region sequence.

154. The method of any of claim 1-128 or 131-153, wherein the method results in expansion of, e.g., selective or preferential expansion of, T cells expressing a T cell receptor (TCR) comprising a TCR alpha and/or TCR beta molecule, e.g., TCR alpha-beta T cells (αβ T cells).

155. The method of any of claim 1-128 or 131-154, wherein the method results in expansion of αβT cells over expansion of T cells expressing a TCR comprising a TCR gamma and/or TCR delta molecule, e.g., TCR gamma-delta T cells (γδ T cells).

The application's sequence listing, which the Patent Office published only in electronic form, follows.

SEQUENCE LISTING (3477 sequences)

SEQ ID NO: 1 - protein, 119 aa, Artificial Sequence
  source: /note="Description of Artificial Sequence: Synthetic polypeptide"
QVQLQQSGPELVKPGTSVKISCKASGYSFTTYYIHWVKQRPGQGLEWIGWFFPGSGNIKYNEKFKGKATLTADTSSSTAYMQLSSLTSEESAVYFCAGSYYSYDVLDYWGHGTTLTVSS

SEQ ID NO: 2 - protein, 107 aa, Artificial Sequence
  source: /note="Description of Artificial Sequence: Synthetic polypeptide"
DILMTQSQKFMSTSLGDRVSVSCKASQNVGINVVWHQQKPGQSPKALIYSSSHRYSGVPDRFTGSGSGTDFTLTINNVQSEDLAEYFCQQFKSYPLTFGAGTKLELK

SEQ ID NO: 3 - protein, 10 aa, Artificial Sequence
  source: /note="Description of Artificial Sequence: Synthetic peptide"
GYSFTTYYIH

SEQ ID NO: 4 - protein, 17 aa, Artificial Sequence
  source: /note="Description of Artificial Sequence: Synthetic peptide"
WFFPGSGNIKYNEKFKG

SEQ ID NO: 5 - protein, 10 aa, Artificial Sequence
  source: /note="Description of Artificial Sequence: Synthetic peptide"
SYYSYDVLDY

SEQ ID NO: 6 - protein, 11 aa, Artificial Sequence
  source: /note="Description of Artificial Sequence: Synthetic peptide"
KASQNVGINVV

SEQ ID NO: 7 - protein, 7 aa, Artificial Sequence
  source: /note="Description of Artificial Sequence: Synthetic peptide"
SSSHRYS

SEQ ID NO: 8 - protein, 9 aa, Artificial Sequence
  source: /note="Description of Artificial Sequence: Synthetic peptide"
QQFKSYPLT

SEQ ID NO: 9 - protein, 119 aa, Artificial Sequence
  source: /note="Description of Artificial Sequence: Synthetic polypeptide"
QVQLVQSGAEVKKPGSSVKVSCKASGYSFTTYYIHWVRQAPGQGLEWMGWFFPGSGNIKYNEKFKGRVTITADTSTSTAYMELSSLRSEDTAVYYCAGSYYSYDVLDYWGQGTTVTVSS

SEQ ID NO: 10 - protein, 107 aa, Artificial Sequence
  source: /note="Description of Artificial Sequence: Synthetic polypeptide"
DIQMTQSPSFLSASVGDRVTITCKASQNVGINVVWHQQKPGKAPKALIYSSSHRYSGVPSRFSGSGSGTEFTLTISSLQPEDFATYFCQQFKSYPLTFGQGTKLEIK

SEQ ID NO: 11 - protein, 107 aa, Artificial Sequence
  source: /note="Description of Artificial Sequence: Synthetic polypeptide"
DIQMTQSPSSLSASVGDRVTITCKASQNVGINVVWHQQKPGKVPKALIYSSSHRYSGVPSRFSGSGSGTDFTLTISSLQPEDVATYFCQQFKSYPLTFGQGTKLEIK

SEQ ID NO: 12 - DNA, 357 bp, Artificial Sequence
  source: /note="Description of Artificial Sequence: Synthetic polynucleotide"
caggtgcagctggttcagtctggcgccgaagtgaagaaacctggctcctccgtgaaggtgtcctgcaaggcttccggctactccttcaccacctactacatccactgggtccgacaggcccctggacaaggattggaatggatgggctggttcttccccggctccggcaacatcaagtacaacgagaagttcaagggccgcgtgaccatcaccgccgacacctctacctctaccgcctacatggaactgtccagcctgagatctgaggacaccgccgtgtactactgcgccggctcctactactcttacgacgtgctggattactggggccagggcaccacagtgacagtgtcctct

SEQ ID NO: 13 - DNA, 321 bp, Artificial Sequence
  source: /note="Description of Artificial Sequence: Synthetic polynucleotide"
gacatccagatgacccagtctccatccttcctgtccgcctctgtgggcgacagagtgaccatcacatgcaaggcctctcagaacgtgggcatcaacgtcgtgtggcaccagcagaagcctggcaaggctcctaaggctctgatctactcctccagccaccggtactctggcgtgccctctagattttccggctctggctctggcaccgagtttaccctgacaatctccagcctgcagcctgaggacttcgccacctacttttgccagcagttcaagagctaccctctgacctttggccagggcaccaagctggaaatcaag

SEQ ID NO: 14 - DNA, 321 bp, Artificial Sequence
  source: /note="Description of Artificial Sequence: Synthetic polynucleotide"
gacatccagatgacccagtctccatcctctctgtccgcctctgtgggcgacagagtgaccatcacatgcaaggcctctcagaacgtgggcatcaacgtcgtgtggcaccagcagaaacctggcaaggtgcccaaggctctgatctactcctccagccacagatactccggcgtgccctctagattctccggctctggctctggcaccgactttaccctgacaatctccagcctgcagcctgaggacgtggccacctacttttgccagcagttcaagagctaccctctgacctttggccagggcaccaagctggaaatcaag

SEQ ID NO: 15 - protein, 117 aa, Artificial Sequence
  source: /note="Description of Artificial Sequence: Synthetic polypeptide"
DVQLVESGGGLVQPGGSRKLSCAASGFTFSNFGMHWVRQAPDKGLEWVAYISSGSSTIYYADTLKGRFTISRDNPKNTLFLQMTSLRSEDTAMYYCARRGEGAMDYWGQGTSVTVSS

SEQ ID NO: 16 - protein, 106 aa, Artificial Sequence
  source: /note="Description of Artificial Sequence: Synthetic polypeptide"
ENVLTQSPAIMSASLGEKVTMSCRASSSVNYIYWYQQKSDASPKLWIYYTSNLAPGVPTRFSGSGSGNSYSLTISSMEGEDAATYYCQQFTSSPFTFGSGTKLEIK

SEQ ID NO: 17 - protein, 10 aa, Artificial Sequence
  source: /note="Description of Artificial Sequence: Synthetic peptide"
GFTFSNFGMH

SEQ ID NO: 18 - protein, 17 aa, Artificial Sequence
  source: /note="Description of Artificial Sequence: Synthetic peptide"
YISSGSSTIYYADTLKG

SEQ ID NO: 19 - protein, 8 aa, Artificial Sequence
  source: /note="Description of Artificial Sequence: Synthetic peptide"
RGEGAMDY

SEQ ID NO: 20 - protein, 10 aa, Artificial Sequence
  source: /note="Description of Artificial Sequence: Synthetic peptide"
RASSSVNYIY

SEQ ID NO: 21 - protein, 7 aa, Artificial Sequence
  source: /note="Description of Artificial Sequence: Synthetic peptide"
YTSNLAP

SEQ ID NO: 22 - protein, 9 aa, Artificial Sequence
  source: /note="Description of Artificial Sequence: Synthetic peptide"
QQFTSSPFT

SEQ ID NO: 23 - protein, 117 aa, Artificial Sequence
  source: /note="Description of Artificial Sequence: Synthetic polypeptide"
EVQLVESGGGLVQPGGSLRLSCAASGFTFSNFGMHWVRQAPGKGLEWVSYISSGSSTIYYADTLKGRFTISRDNAKNSLYLQMNSLRAEDTAVYYCARRGEGAMDYWGQGTTVTVSS

SEQ ID NO: 24 - protein, 117 aa, Artificial Sequence
  source: /note="Description of Artificial Sequence: Synthetic polypeptide"
EVQLVESGGGLVQPGGSLRLSCAASGFTFSNFGMHWVRQAPGKGLEWVSYISSGSSTIYYADTLKGRFTISRDNSKNTLYLQMNSLRAEDTAVYYCARRGEGAMDYWGQGTTVTVSS

SEQ ID NO: 25 - protein, 117 aa, Artificial Sequence
  source: /note="Description of Artificial Sequence: Synthetic polypeptide"
QVQLVESGGGVVQPGRSLRLSCAASGFTFSNFGMHWVRQAPGKGLEWVAYISSGSSTIYYADTLKGRFTISRDNSKNTLYLQMNSLRAEDTAVYYCARRGEGAMDYWGQGTTVTVSS

SEQ ID NO: 26 - protein, 106 aa, Artificial Sequence
  source: /note="Description of Artificial Sequence: Synthetic polypeptide"
DNQLTQSPSFLSASVGDRVTITCRASSSVNYIYWYQQKPGKAPKLLIYYTSNLAPGVPSRFSGSGSGNEYTLTISSLQPEDFATYYCQQFTSSPFTFGQGTKLEIK

SEQ ID NO: 27 - protein, 106 aa, Artificial Sequence
  source: /note="Description of Artificial Sequence: Synthetic polypeptide"
DNQLTQSPSSLSASVGDRVTITCRASSSVNYIYWYQQKPGKAPKLLIYYTSNLAPGVPSRFSGSGSGNDYTLTISSLQPEDFATYYCQQFTSSPFTFGQGTKLEIK

SEQ ID NO: 28 - protein, 106 aa, Artificial Sequence
  source: /note="Description of Artificial Sequence: Synthetic polypeptide"
ENVLTQSPATLSVSPGERATLSCRASSSVNYIYWYQQKPGQAPRLLIYYTSNLAPGIPARFSGSGSGNEYTLTISSLQSEDFAVYYCQQFTSSPFTFGQGTKLEIK

SEQ ID NO: 29 - protein, 105 aa, Artificial Sequence
  source: /note="Description of Artificial Sequence: Synthetic polypeptide"
QNVLTQPPSASGTPGQRVTISCRASSSVNYIYWYQQLPGTAPKLLIYYTSNLAPGVPDRFSGSGSGNSYSLAISGLRSEDEADYYCQQFTSSPFTFGTGTKVTVL

SEQ ID NO: 30 - protein, 105 aa, Artificial Sequence
  source: /note="Description of Artificial Sequence: Synthetic polypeptide"
SNELTQPPSVSVSPGQTARITCRASSSVNYIYWYQQKSGQAPVLVIYYTSNLAPGIPERFSGSGSGNMYTLTISGAQVEDEADYYCQQFTSSPFTFGTGTKVTVL

SEQ ID NO: 31 - DNA, 351 bp, Artificial Sequence
  source: /note="Description of Artificial Sequence: Synthetic polynucleotide"
gaggtgcagctggttgaatctggcggaggattggttcagcctggcggctctctgagactgtcttgtgccgcttctggcttcaccttctccaacttcggcatgcactgggtccgacaggcccctggaaaaggactggaatgggtgtcctacatctcctccggctcctccaccatctactacgctgacaccctgaagggcagattcaccatctctcgggacaacgccaagaactccctgtacctgcagatgaacagcctgagagccgaggacaccgccgtgtactactgtgctagaagaggcgagggcgccatggattattggggccagggaaccacagtgaccgtgtctagc

SEQ ID NO: 32 - DNA, 351 bp, Artificial Sequence
  source: /note="Description of Artificial Sequence: Synthetic polynucleotide"
gaggtgcagctggttgaatctggcggaggattggttcagcctggcggctctctgagactgtcttgtgccgcttctggcttcaccttctccaacttcggcatgcactgggtccgacaggcccctggaaaaggactggaatgggtgtcctacatctcctccggctcctccaccatctactacgctgacaccctgaagggcagattcaccatcagccgggacaactccaagaacaccctgtacctgcagatgaactccctgagagccgaggacaccgccgtgtactactgtgctagaagaggcgagggcgccatggattattggggccagggaaccacagtgaccgtgtctagc

SEQ ID NO: 33 - DNA, 351 bp, Artificial Sequence
  source: /note="Description of Artificial Sequence: Synthetic polynucleotide"
caggtgcagctggtggaatctggtggcggagttgtgcagcctggcagatccctgagactgtcttgtgccgcctctggcttcaccttctccaacttcggcatgcactgggtccgacaggcccctggaaaaggattggagtgggtcgcctacatctcctccggctcctccaccatctactacgctgacaccctgaagggcagattcaccatcagccgggacaactccaagaacaccctgtacctgcagatgaactccctgagagccgaggacaccgccgtgtactactgtgctagaagaggcgagggcgccatggattattggggccagggaaccacagtgaccgtgtctagc

SEQ ID NO: 34 - DNA, 318 bp, Artificial Sequence
  source: /note="Description of Artificial Sequence: Synthetic polynucleotide"
gataaccagctgacccagtctcctagcttcctgtctgcctctgtgggcgacagagtgacaattacctgccgggcctcctcctccgtgaactacatctactggtatcagcagaagcccggcaaggcccctaagctgctgatctactacacctccaatctggcccctggcgtgccctctagattttccggatctggctccggcaacgagtataccctgacaatctccagcctgcagcctgaggacttcgccacctactactgccagcagttcacctcctctccattcacctttggccagggcaccaagctggaaatcaaa

SEQ ID NO: 35 - DNA, 317 bp, Artificial Sequence
  source: /note="Description of Artificial Sequence: Synthetic polynucleotide"
ataaccagctgacccagtctccttccagcctgtctgcttctgtgggcgacagagtgacaattacctgccgggcctcctcctccgtgaactacatctactggtatcagcagaagcccggcaaggcccctaagctgctgatctactacacctccaatctggcccctggcgtgccctctagattttccggatctggctccggcaacgactataccctgacaatctccagcctgcagcctgaggacttcgccacctactactgccagcagttcacctcctctccattcacctttggccagggcaccaagctggaaatcaaa

SEQ ID NO: 36 - DNA, 318 bp, Artificial Sequence
  source: /note="Description of Artificial Sequence: Synthetic polynucleotide"
gagaatgtgctgacccagtctcctgccacactgtctgttagccctggcgagagagctaccctgagctgcagagcctcttcctccgtgaactacatctactggtatcagcagaagcccggccaggctcctagactgctgatctactacacctccaatctggcccctggcatccctgccagattttccggatctggctccggcaacgagtataccctgaccatctccagcctgcagtccgaggactttgctgtgtactattgccagcagttcacaagcagccctttcacctttggccagggcaccaagctggaaatcaaa

SEQ ID NO: 37 - DNA, 315 bp, Artificial Sequence
  source: /note="Description of Artificial Sequence: Synthetic polynucleotide"
cagaatgtgctgacccaacctccttccgcctctggcacacctggacagagagtgacaatctcctgccgggcctcctcctccgtgaactacatctactggtatcagcagctgcccggcaccgctcctaaactgctgatctactacacctccaatctggcccctggcgtgcccgatagattttccggatctggctccggcaactcctacagcctggctatctctggcctgagatctgaggacgaggccgactactactgccagcagttcacctcctctccattcacctttggcaccggcaccaaagtgacagttctt

SEQ ID NO: 38 - DNA, 315 bp, Artificial Sequence
  source: /note="Description of Artificial Sequence: Synthetic polynucleotide"
tctaatgagctgacccagcctccttccgtgtccgtgtctcctggacagaccgccagaattacctgccgggcctcctcctccgtgaactacatctactggtatcagcagaagtccggccaggctcctgtgctcgtgatctactacacctccaatctggcccctggcatccctgagagattctccggatctggctccggcaacatgtacaccctgaccatctctggcgcccaggtggaagatgaggccgactactactgccagcagttcacctcctctccattcacctttggcaccggcaccaaagtgacagttctt

SEQ ID NO: 39 - protein, 107 aa, Homo sapiens [sequence omitted]

SEQ ID NO: 40 - protein, 326 aa, Artificial Sequence
  source: /note="Description of Artificial Sequence: Synthetic polypeptide"
ASTKGPSVFPLAPCSRSTSESTAALGCLVKDYFPEPVTVSWNSGALTSGVHTFPAVLQSSGLYSLSSVVTVPSSSLGTKTYTCNVDHKPSNTKVDKRVESKYGPPCPPCPAPEFLGGPSVFLFPPKPKDTLMISRTPEVTCVVVDVSQEDPEVQFNWYVDGVEVHNAKTKPREEQFNSTYRVVSVLTVLHQDWLNGKEYKCKVSNKGLPSSIEKTISKAKGQPREPQVYTLPPSQEEMTKNQVSLTCLVKGFYPSDIAVEWESNGQPENNYKTTPPVLDSDGSFFLYSRLTVDKSRWQEGNVFSCSVMHEALHNHYTQKSLSLSLG

SEQ ID NO: 41 - protein, 330 aa, Homo sapiens
ASTKGPSVFPLAPSSKSTSGGTAALGCLVKDYFPEPVTVSWNSGALTSGVHTFPAVLQSSGLYSLSSVVTVPSSSLGTQTYICNVNHKPSNTKVDKRVEPKSCDKTHTCPPCPAPELLGGPSVFLFPPKPKDTLMISRTPEVTCVVVDVSHEDPEVKFNWYVDGVEVHNAKTKPREEQYNSTYRVVSVLTVLHQDWLNGKEYKCKVSNKALPAPIEKTISKAKGQPREPQVYTLPPSREEMTKNQVSLTCLVKGFYPSDIAVEWESNGQPENNYKTTPPVLDSDGSFFLYSKLTVDKSRWQQGNVFSCSVMHEALHNHYTQKSLSLSPGK

SEQ ID NO: 42 - protein, 330 aa, Artificial Sequence
  source: /note="Description of Artificial Sequence: Synthetic polypeptide"
ASTKGPSVFPLAPSSKSTSGGTAALGCLVKDYFPEPVTVSWNSGALTSGVHTFPAVLQSSGLYSLSSVVTVPSSSLGTQTYICNVNHKPSNTKVDKRVEPKSCDKTHTCPPCPAPELLGGPSVFLFPPKPKDTLMISRTPEVTCVVVDVSHEDPEVKFNWYVDGVEVHNAKTKPREEQYASTYRVVSVLTVLHQDWLNGKEYKCKVSNKALPAPIEKTISKAKGQPREPQVYTLPPSREEMTKNQVSLTCLVKGFYPSDIAVEWESNGQPENNYKTTPPVLDSDGSFFLYSKLTVDKSRWQQGNVFSCSVMHEALHNHYTQKSLSLSPGK

SEQ ID NO: 43 - DNA, 344 bp, Artificial Sequence
  source: /note="Description of Artificial Sequence: Synthetic polynucleotide"
atgagcatcggcctcctgtgctgtgcagccttgtctctcctgtgggcaggtccagtgaatgctggtgtcactcagaccccaaaattccaggtcctgaagacaggacagagcatgacactgcagtgtgcccaggatatgaaccatgaatacatgtcctggtatcgacaagacccaggcatggggctgaggctgattcattactcagttggtgctggtatcactgaccaaggagaagtccccaatggctacaatgtctccagatcaaccacagaggatttcccgctcaggctgctgtcggctgctccctcccagacatctgtgtacttctgtgccagcagttactc

SEQ ID NO: 44 - protein, 114 aa, Artificial Sequence
  source: /note="Description of Artificial Sequence: Synthetic polypeptide"
MSIGLLCCAALSLLWAGPVNAGVTQTPKFQVLKTGQSMTLQCAQDMNHEYMSWYRQDPGMGLRLIHYSVGAGITDQGEVPNGYNVSRSTTEDFPLRLLSAAPSQTSVYFCASSY

SEQ ID NO: 45 - protein, 5 aa, Artificial Sequence
  source: /note="Description of Artificial Sequence: Synthetic peptide"
TYYIH

SEQ ID NO: 46 - protein, 17 aa, Artificial Sequence
  source: /note="Description of Artificial Sequence: Synthetic peptide"
WFFPGSGNIKYNEKFKG

SEQ ID NO: 47 - protein, 10 aa, Artificial Sequence
  source: /note="Description of Artificial Sequence: Synthetic peptide"
SYYSYDVLDY

SEQ ID NO: 48 - protein, 7 aa, Artificial Sequence
  source: /note="Description of Artificial Sequence: Synthetic peptide"
GYSFTTY

SEQ ID NO: 49 - protein, 6 aa, Artificial Sequence
  source: /note="Description of Artificial Sequence: Synthetic peptide"
FPGSGN

SEQ ID NO: 50 - protein, 10 aa, Artificial Sequence
  source: /note="Description of Artificial Sequence: Synthetic peptide"
SYYSYDVLDY

SEQ ID NO: 51 - protein, 11 aa, Artificial Sequence
  source: /note="Description of Artificial Sequence: Synthetic peptide"
KASQNVGINVV

SEQ ID NO: 52 - protein, 7 aa, Artificial Sequence
  source: /note="Description of Artificial Sequence: Synthetic peptide"
SSSHRYS

SEQ ID NO: 53 - protein, 9 aa, Artificial Sequence
  source: /note="Description of Artificial Sequence: Synthetic peptide"
QQFKSYPLT

SEQ ID NO: 54 - protein, 11 aa, Artificial Sequence
  source: /note="Description of Artificial Sequence: Synthetic peptide"
KASQNVGINVV

SEQ ID NO: 55 - protein, 7 aa, Artificial Sequence
  source: /note="Description of Artificial Sequence: Synthetic peptide"
SSSHRYS

SEQ ID NO: 56 - protein, 9 aa, Artificial Sequence
  source: /note="Description of Artificial Sequence: Synthetic peptide"
QQFKSYPLT

SEQ ID NO: 57 - protein, 5 aa, Artificial Sequence
  source: /note="Description of Artificial Sequence: Synthetic peptide"
NFGMH

SEQ ID NO: 58 - protein, 17 aa, Artificial Sequence
  source: /note="Description of Artificial Sequence: Synthetic peptide"
YISSGSSTIYYADTLKG

SEQ ID NO: 59 - protein, 8 aa, Artificial Sequence
  source: /note="Description of Artificial Sequence: Synthetic peptide"
RGEGAMDY

SEQ ID NO: 60 - protein, 7 aa, Artificial Sequence
  source: /note="Description of Artificial Sequence: Synthetic peptide"
GFTFSNF

SEQ ID NO: 61 - protein, 6 aa, Artificial Sequence
  source: /note="Description of Artificial Sequence: Synthetic peptide"
SSGSST

SEQ ID NO: 62 - protein, 8 aa, Artificial Sequence
  source: /note="Description of Artificial Sequence: Synthetic peptide"
RGEGAMDY

SEQ ID NO: 63 - protein, 10 aa, Artificial Sequence
  source: /note="Description of Artificial Sequence: Synthetic peptide"
RASSSVNYIY

SEQ ID NO: 64 - protein, 7 aa, Artificial Sequence
  source: /note="Description of Artificial Sequence: Synthetic peptide"
YTSNLAP

SEQ ID NO: 65 - protein, 9 aa, Artificial Sequence
  source: /note="Description of Artificial Sequence: Synthetic peptide"
QQFTSSPFT

SEQ ID NO: 66 - protein, 10 aa, Artificial Sequence
  source: /note="Description of Artificial Sequence: Synthetic peptide"
RASSSVNYIY

SEQ ID NO: 67 - protein, 7 aa, Artificial Sequence
  source: /note="Description of Artificial Sequence: Synthetic peptide"
YTSNLAP

SEQ ID NO: 68 - protein, 9 aa, Artificial Sequence
  source: /note="Description of Artificial Sequence: Synthetic peptide"
QQFTSSPFT

SEQ ID NO: 69 - protein, 592 aa, Artificial Sequence
  source: /note="Description of Artificial Sequence: Synthetic polypeptide"
METDTLLLWVLLLWVPGSTGQVQLVQSGAEVKKPGSSVKVSCKASGYSFTTYYIHWVRQAPGQGLEWMGWFFPGSGNIKYNEKFKGRVTITADTSTSTAYMELSSLRSEDTAVYYCAGSYYSYDVLDYWGQGTTVTVSSGSASAPTLFPLVSCENSPSDTSSVAVGCLAQDFLPDSITFSWKYKNNSDISSTRGFPSVLRGGKYAATSQVLLPSKDVMQGTDEHVVCKVQHPNGNKEKNVPLPVIAELPPKVSVFVPPRDGFFGNPRKSKLICQATGFSPRQIQVSWLREGKQVGSGVTTDQVQAEAKESGPTTYKVTSTLTIKESDWLGQSMFTCRVDHRGLTFQQNASSMCVPDQDTAIRVFAIPPSFASIFLTKSTKLTCLVTDLTTYDSVTISWTRQNGEAVKTHTNISESHPNATFSAVGEASICEDDWNSGERFTCTVTHTDLASSLKQTISRPKGVALHRPDVYLLPPAREQLNLRESATITCLVTGFSPADVFVQWMQRGQPLSPEKYVTSAPMPEPQAPGRYFAHSILTVSEEEWNTGETYTCVVAHEALPNRVTERTVDKSTGKPTLYNVSLVMSDTAGTCY

SEQ ID NO: 70 - protein, 492 aa, Artificial Sequence
  source: /note="Description of Artificial Sequence: Synthetic polypeptide"
METDTLLLWVLLLWVPGSTGQVQLVQSGAEVKKPGSSVKVSCKASGYSFTTYYIHWVRQAPGQGLEWMGWFFPGSGNIKYNEKFKGRVTITADTSTSTAYMELSSLRSEDTAVYYCAGSYYSYDVLDYWGQGTTVTVSSASPTSPKVFPLSLCSTQPDGNVVIACLVQGFFPQEPLSVTWSESGQGVTARNFPPSQDASGDLYTTSSQLTLPATQCLAGKSVTCHVKHYTNPSQDVTVPCPVPSTPPTPSPSTPPTPSPSCCHPRLSLHRPALEDLLLGSEANLTCTLTGLRDASGVTFTWTPSSGKSAVQGPPERDLCGCYSVSSVLPGCAEPWNHGKTFTCTAAYPESKTPLTATLSKSGNTFRPEVHLLPPPSEELALNELVTLTCLARGFSPKDVLVRWLQGSQELPREKYLTWASRQEPSQGTTTFAVTSILRVAAEDWKKGDTFSCMVGHEALPLAFTQKTIDRLAGKPTHVNVSVVMAEVDGTCY

SEQ ID NO: 71 - protein, 479 aa, Artificial Sequence
  source: /note="Description of Artificial Sequence: Synthetic polypeptide"
METDTLLLWVLLLWVPGSTGQVQLVQSGAEVKKPGSSVKVSCKASGYSFTTYYIHWVRQAPGQGLEWMGWFFPGSGNIKYNEKFKGRVTITADTSTSTAYMELSSLRSEDTAVYYCAGSYYSYDVLDYWGQGTTVTVSSASPTSPKVFPLSLDSTPQDGNVVVACLVQGFFPQEPLSVTWSESGQNVTARNFPPSQDASGDLYTTSSQLTLPATQCPDGKSVTCHVKHYTNSSQDVTVPCRVPPPPPCCHPRLSLHRPALEDLLLGSEANLTCTLTGLRDASGATFTWTPSSGKSAVQGPPERDLCGCYSVSSVLPGCAQPWNHGETFTCTAAHPELKTPLTANITKSGNTFRPEVHLLPPPSEELALNELVTLTCLARGFSPKDVLVRWLQGSQELPREKYLTWASRQEPSQGTTTYAVTSILRVAAEDWKKGETFSCMVGHEALPLAFTQKTIDRMAGKPTHINVSVVMAEADGTCY

SEQ ID NO: 72 - protein, 234 aa, Artificial Sequence
  source: /note="Description of Artificial Sequence: Synthetic polypeptide"
METDTLLLWVLLLWVPGSTGDIQMTQSPSFLSASVGDRVTITCKASQNVGINVVWHQQKPGKAPKALIYSSSHRYSGVPSRFSGSGSGTEFTLTISSLQPEDFATYFCQQFKSYPLTFGQGTKLEIKRTVAAPSVFIFPPSDEQLKSGTASVVCLLNNFYPREAKVQWKVDNALQSGNSQESVTEQDSKDSTYSLSSTLTLSKADYEKHKVYACEVTHQGLSSPVTKSFNRGEC

SEQ ID NO: 73 - protein, 453 aa, Artificial Sequence
  source: /note="Description of Artificial Sequence: Synthetic polypeptide"
GSASAPTLFPLVSCENSPSDTSSVAVGCLAQDFLPDSITFSWKYKNNSDISSTRGFPSVLRGGKYAATSQVLLPSKDVMQGTDEHVVCKVQHPNGNKEKNVPLPVIAELPPKVSVFVPPRDGFFGNPRKSKLICQATGFSPRQIQVSWLREGKQVGSGVTTDQVQAEAKESGPTTYKVTSTLTIKESDWLGQSMFTCRVDHRGLTFQQNASSMCVPDQDTAIRVFAIPPSFASIFLTKSTKLTCLVTDLTTYDSVTISWTRQNGEAVKTHTNISESHPNATFSAVGEASICEDDWNSGERFTCTVTHTDLASSLKQTISRPKGVALHRPDVYLLPPAREQLNLRESATITCLVTGFSPADVFVQWMQRGQPLSPEKYVTSAPMPEPQAPGRYFAHSILTVSEEEWNTGETYTCVVAHEALPNRVTERTVDKSTGKPTLYNVSLVMSDTAGTCY

SEQ ID NO: 74 - protein, 353 aa, Artificial Sequence
  source: /note="Description of Artificial Sequence: Synthetic polypeptide"
ASPTSPKVFPLSLCSTQPDGNVVIACLVQGFFPQEPLSVTWSESGQGVTARNFPPSQDASGDLYTTSSQLTLPATQCLAGKSVTCHVKHYTNPSQDVTVPCPVPSTPPTPSPSTPPTPSPSCCHPRLSLHRPALEDLLLGSEANLTCTLTGLRDASGVTFTWTPSSGKSAVQGPPERDLCGCYSVSSVLPGCAEPWNHGKTFTCTAAYPESKTPLTATLSKSGNTFRPEVHLLPPPSEELALNELVTLTCLARGFSPKDVLVRWLQGSQELPREKYLTWASRQEPSQGTTTFAVTSILRVAAEDWKKGDTFSCMVGHEALPLAFTQKTIDRLAGKPTHVNVSVVMAEVDGTCY

SEQ ID NO: 75 - protein, 340 aa, Artificial Sequence
  source: /note="Description of Artificial Sequence: Synthetic polypeptide"
ASPTSPKVFPLSLDSTPQDGNVVVACLVQGFFPQEPLSVTWSESGQNVTARNFPPSQDASGDLYTTSSQLTLPATQCPDGKSVTCHVKHYTNSSQDVTVPCRVPPPPPCCHPRLSLHRPALEDLLLGSEANLTCTLTGLRDASGATFTWTPSSGKSAVQGPPERDLCGCYSVSSVLPGCAQPWNHGETFTCTAAHPELKTPLTANITKSGNTFRPEVHLLPPPSEELALNELVTLTCLARGFSPKDVLVRWLQGSQELPREKYLTWASRQEPSQGTTTYAVTSILRVAAEDWKKGETFSCMVGHEALPLAFTQKTIDRMAGKPTHINVSVVMAEADGTCY

SEQ ID NO: 76 - protein, 159 aa, Homo sapiens
MKNHLLFWGVLAVFIKAVHVKAQEDERIVLVDNKCKCARITSRIIRSSEDPNEDIVERNIRIIVPLNNRENISDPTSPLRTRFVYHLSDLCKKCDPTEVELDNQIVTATQSNICDEDSATETCYTYDRNKCYTAVVPLVYGGETKMVETALTPDACYPD

SEQ ID NO: 77-79 - skipped (3 entries)

SEQ ID NO: 80 - protein, 246 aa, Artificial Sequence
  source: /note="Description of Artificial Sequence: Synthetic polypeptide"
QVQLVQSGAEVKKPGSSVKVSCKASGTDFKLTYIHWVRQAPGQGLEWMGRVSPGSGNTKYNEKFKGRVTITADTSTSTAYMELSSLRSEDTAVYYCAGSYYSYDVLDYWGQGTTVTVSSGGGGSGGGGSGGGGSGGGGSDIQMTQSPSFLSASVGDRVTITCKASQNVEDRVAWYQQKPGKAPKALIYSSSHRYKGVPSRFSGSGSGTEFTLTISSLQPEDFATYFCQQFKSYPLTFGQGTKLEIK

SEQ ID NO: 81 - protein, 107 aa, Artificial Sequence
  source: /note="Description of Artificial Sequence: Synthetic polypeptide"
DIQMTQSPSFLSASVGDRVTITCKASQNVEDRVAWYQQKPGKAPKALIYSSSHRYKGVPSRFSGSGSGTEFTLTISSLQPEDFATYFCQQFKSYPLTFGQGTKLEIK

SEQ ID NO: 82 - protein, 119 aa, Artificial Sequence
  source: /note="Description of Artificial Sequence: Synthetic polypeptide"
QVQLVQSGAEVKKPGSSVKVSCKASGTDFKLTYIHWVRQAPGQGLEWMGRVSPGSGNTKYNEKFKGRVTITADTSTSTAYMELSSLRSEDTAVYYCAGSYYSYDVLDYWGQGTTVTVSS

SEQ ID NO: 83 - protein, 246 aa, Artificial Sequence
  source: /note="Description of Artificial Sequence: Synthetic polypeptide"
QVQLVQSGAEVKKPGSSVKVSCKASGTDFDKIYIHWVRQAPGQGLEWMGRISAGSGNVKYNEKFKGRVTITADTSTSTAYMELSSLRSEDTAVYYCAGSYYSYDVLDYWGQGTTVTVSSGGGGSGGGGSGGGGSGGGGSDIQMTQSPSFLSASVGDRVTITCKASQNVEDRVAWYQQKPGKAPKALIYSSSHRYKGVPSRFSGSGSGTEFTLTISSLQPEDFATYFCQQFKSYPLTFGQGTKLEIK

SEQ ID NO: 84 - protein, 107 aa, Artificial Sequence; identical to SEQ ID NO: 81
  source: /note="Description of Artificial Sequence: Synthetic polypeptide"

SEQ ID NO: 85 - protein, 119 aa, Artificial Sequence
  source: /note="Description of Artificial Sequence: Synthetic polypeptide"
QVQLVQSGAEVKKPGSSVKVSCKASGTDFDKIYIHWVRQAPGQGLEWMGRISAGSGNVKYNEKFKGRVTITADTSTSTAYMELSSLRSEDTAVYYCAGSYYSYDVLDYWGQGTTVTVSS

SEQ ID NO: 86 - protein, 246 aa, Artificial Sequence
  source: /note="Description of Artificial Sequence: Synthetic polypeptide"
QVQLVQSGAEVKKPGSSVKVSCKASGHDFRDFYIHWVRQAPGQGLEWMGRVYPGSGSYRYNEKFKGRVTITADTSTSTAYMELSSLRSEDTAVYYCAGSYYSYDVLDYWGQGTTVTVSSGGGGSGGGGSGGGGSGGGGSDIQMTQSPSFLSASVGDRVTITCKASQNVDDRVAWYQQKPGKAPKALIYSSSHRYKGVPSRFSGSGSGTEFTLTISSLQPEDFATYFCQQFKSYPLTFGQGTKLEIK

SEQ ID NO: 87 - protein, 107 aa, Artificial Sequence
  source: /note="Description of Artificial Sequence: Synthetic polypeptide"
DIQMTQSPSFLSASVGDRVTITCKASQNVDDRVAWYQQKPGKAPKALIYSSSHRYKGVPSRFSGSGSGTEFTLTISSLQPEDFATYFCQQFKSYPLTFGQGTKLEIK

SEQ ID NO: 88 - protein, 119 aa, Artificial Sequence
  source: /note="Description of Artificial Sequence: Synthetic polypeptide"
QVQLVQSGAEVKKPGSSVKVSCKASGHDFRDFYIHWVRQAPGQGLEWMGRVYPGSGSYRYNEKFKGRVTITADTSTSTAYMELSSLRSEDTAVYYCAGSYYSYDVLDYWGQGTTVTVSS

SEQ ID NO: 89 - protein, 246 aa, Artificial Sequence
  source: /note="Description of Artificial Sequence: Synthetic polypeptide"
QVQLVQSGAEVKKPGSSVKVSCKASGHDFKLTYIHWVRQAPGQGLEWMGRISAGSGNVKYNEKFKGRVTITADTSTSTAYMELSSLRSEDTAVYYCAGSYYSYDVLDYWGQGTTVTVSSGGGGSGGGGSGGGGSGGGGSDIQMTQSPSFLSASVGDRVTITCKASQNVDNRVAWYQQKPGKAPKALIYSSSHRYKGVPSRFSGSGSGTEFTLTISSLQPEDFATYFCQQFKSYPLTFGQGTKLEIK

SEQ ID NO: 90 - protein, 107 aa, Artificial Sequence
  source: /note="Description of Artificial Sequence: Synthetic polypeptide"
DIQMTQSPSFLSASVGDRVTITCKASQNVDNRVAWYQQKPGKAPKALIYSSSHRYKGVPSRFSGSGSGTEFTLTISSLQPEDFATYFCQQFKSYPLTFGQGTKLEIK

SEQ ID NO: 91 - protein, 119 aa, Artificial Sequence
  source: /note="Description of Artificial Sequence: Synthetic polypeptide"
QVQLVQSGAEVKKPGSSVKVSCKASGHDFKLTYIHWVRQAPGQGLEWMGRISAGSGNVKYNEKFKGRVTITADTSTSTAYMELSSLRSEDTAVYYCAGSYYSYDVLDYWGQGTTVTVSS

SEQ ID NO: 92 - protein, 246 aa, Artificial Sequence
  source: /note="Description of Artificial Sequence: Synthetic polypeptide"
QVQLVQSGAEVKKPGSSVKVSCKASGTDFKLTYIHWVRQAPGQGLEWMGRIFPGSGNVKYNEKFKGRVTITADTSTSTAYMELSSLRSEDTAVYYCAGSYYSYDVLDYWGQGTTVTVSSGGGGSGGGGSGGGGSGGGGSDIQMTQSPSFLSASVGDRVTITCKASQNVENKVAWHQQKPGKAPKALIYSSSHRYKGVPSRFSGSGSGTEFTLTISSLQPEDFATYFCQQFKSYPLTFGQGTKLEIK

SEQ ID NO: 93 - protein, 107 aa, Artificial Sequence
  source: /note="Description of Artificial Sequence: Synthetic polypeptide"
DIQMTQSPSFLSASVGDRVTITCKASQNVENKVAWHQQKPGKAPKALIYSSSHRYKGVPSRFSGSGSGTEFTLTISSLQPEDFATYFCQQFKSYPLTFGQGTKLEIK

SEQ ID NO: 94 - protein, 119 aa, Artificial Sequence
  source: /note="Description of Artificial Sequence: Synthetic polypeptide"
QVQLVQSGAEVKKPGSSVKVSCKASGTDFKLTYIHWVRQAPGQGLEWMGRIFPGSGNVKYNEKFKGRVTITADTSTSTAYMELSSLRSEDTAVYYCAGSYYSYDVLDYWGQGTTVTVSS

SEQ ID NO: 95 - protein, 246 aa, Artificial Sequence
  source: /note="Description of Artificial Sequence: Synthetic polypeptide"
QVQLVQSGAEVKKPGSSVKVSCKASGTDFDKIYIHWVRQAPGQGLEWMGRIFAGSGNTKYNEKFKGRVTITADTSTSTAYMELSSLRSEDTAVYYCAGSYYSYDVLDYWGQGTTVTVSSGGGGSGGGGSGGGGSGGGGSDIQMTQSPSFLSASVGDRVTITCKASQNVDDRVAWYQQKPGKAPKALIYSSSHRYKGVPSRFSGSGSGTEFTLTISSLQPEDFATYFCQQFKSYPLTFGQGTKLEIK

SEQ ID NO: 96 - protein, 107 aa, Artificial Sequence; identical to SEQ ID NO: 87
  source: /note="Description of Artificial Sequence: Synthetic polypeptide"

SEQ ID NO: 97 - protein, 119 aa, Artificial Sequence
  source: /note="Description of Artificial Sequence: Synthetic polypeptide"
QVQLVQSGAEVKKPGSSVKVSCKASGTDFDKIYIHWVRQAPGQGLEWMGRIFAGSGNTKYNEKFKGRVTITADTSTSTAYMELSSLRSEDTAVYYCAGSYYSYDVLDYWGQGTTVTVSS

SEQ ID NO: 98 - protein, 246 aa, Artificial Sequence
  source: /note="Description of Artificial Sequence: Synthetic polypeptide"
QVQLVQSGAEVKKPGSSVKVSCKASGHDFDKFYIHWVRQAPGQGLEWMGRVSAGSGNVKYNEKFKGRVTITADTSTSTAYMELSSLRSEDTAVYYCAGSYYSYDVLDYWGQGTTVTVSSGGGGSGGGGSGGGGSGGGGSDIQMTQSPSFLSASVGDRVTITCKASQNVGNRVAWYQQKPGKAPKALIYSSSHRYSGVPSRFSGSGSGTEFTLTISSLQPEDFATYFCQQFKSYPLTFGQGTKLEIK

SEQ ID NO: 99 - protein, 107 aa, Artificial Sequence
  source: /note="Description of Artificial Sequence: Synthetic polypeptide"
DIQMTQSPSFLSASVGDRVTITCKASQNVGNRVAWYQQKPGKAPKALIYSSSHRYSGVPSRFSGSGSGTEFTLTISSLQPEDFATYFCQQFKSYPLTFGQGTKLEIK

SEQ ID NO: 100 - protein, 119 aa, Artificial Sequence
  source: /note="Description of Artificial Sequence: Synthetic polypeptide"
QVQLVQSGAEVKKPGSSVKVSCKASGHDFDKFYIHWVRQAPGQGLEWMGRVSAGSGNVKYNEKFKGRVTITADTSTSTAYMELSSLRSEDTAVYYCAGSYYSYDVLDYWGQGTTVTVSS

SEQ ID NO: 101 - protein, 247 aa, Artificial Sequence
  source: /note="Description of Artificial Sequence: Synthetic polypeptide"
QVQLVQSGAEVKKPGSSVKVSCKASGHDFDKFYIHWVRQAPGQGLEWMGRIFAGSGNVKYNEKFKGRVTITADTSTSTAYMELSSLRSEDTAVYYCAGSYYSYDVLDYWGQGTTVTVSSGGGGSGGGGSGGGGSGGGGSDIQMTQSPSFLSASVGDRVTITCKASQNVGDRVAWYQQKPGKAPKALIYSSSHRYKGVPSRFSGSGSGTEFTLTISSLQPEDFATYFCQQFKSYPLTFGQGTKLEIKS

SEQ ID NO: 102 - protein, 107 aa, Artificial Sequence
  source: /note="Description of Artificial Sequence: Synthetic polypeptide"
DIQMTQSPSFLSASVGDRVTITCKASQNVGDRVAWYQQKPGKAPKALIYSSSHRYKGVPSRFSGSGSGTEFTLTISSLQPEDFATYFCQQFKSYPLTFGQGTKLEIK

SEQ ID NO: 103 - protein, 119 aa, Artificial Sequence
  source: /note="Description of Artificial Sequence: Synthetic polypeptide"
QVQLVQSGAEVKKPGSSVKVSCKASGHDFDKFYIHWVRQAPGQGLEWMGRIFAGSGNVKYNEKFKGRVTITADTSTSTAYMELSSLRSEDTAVYYCAGSYYSYDVLDYWGQGTTVTVSS

SEQ ID NO: 104 - protein, 246 aa, Artificial Sequence
  source: /note="Description of Artificial Sequence: Synthetic polypeptide"
QVQLVQSGAEVKKPGSSVKVSCKASGTDFKLTYIHWVRQAPGQGLEWMGRVSPGSGNVKYNEKFKGRVTITADTSTSTAYMELSSLRSEDTAVYYCAGSYYSYDVLDYWGQGTTVTVSSGGGGSGGGGSGGGGSGGGGSDIQMTQSPSFLSASVGDRVTITCKASQNVGDRVAWYQQKPGKAPKALIYSSSHRYKGVPSRFSGSGSGTEFTLTISSLQPEDFATYFCQQFKSYPLTFGQGTKLEIK

SEQ ID NO: 105 - protein, 107 aa, Artificial Sequence; identical to SEQ ID NO: 102
  source: /note="Description of Artificial Sequence: Synthetic polypeptide"

SEQ ID NO: 106 - protein, 119 aa, Artificial Sequence
  source: /note="Description of Artificial Sequence: Synthetic polypeptide"
QVQLVQSGAEVKKPGSSVKVSCKASGTDFKLTYIHWVRQAPGQGLEWMGRVSPGSGNVKYNEKFKGRVTITADTSTSTAYMELSSLRSEDTAVYYCAGSYYSYDVLDYWGQGTTVTVSS

SEQ ID NO: 107 - protein, 246 aa, Artificial Sequence
  source: /note="Description of Artificial Sequence: Synthetic polypeptide"
QVQLVQSGAEVKKPGSSVKVSCKASGTDFDKIYIHWVRQAPGQGLEWMGRVSAGSGNTKYNEKFKGRVTITADTSTSTAYMELSSLRSEDTAVYYCAGSYYSYDVLDYWGQGTTVTVSSGGGGSGGGGSGGGGSGGGGSDIQMTQSPSFLSASVGDRVTITCKASQNVGNRVAWYQQKPGKAPKALIYSSSHRYKGVPSRFSGSGSGTEFTLTISSLQPEDFATYFCQQFKSYPLTFGQGTKLEIK

SEQ ID NO: 108 - protein, 107 aa, Artificial Sequence
  source: /note="Description of Artificial Sequence: Synthetic polypeptide"
DIQMTQSPSFLSASVGDRVTITCKASQNVGNRVAWYQQKPGKAPKALIYSSSHRYKGVPSRFSGSGSGTEFTLTISSLQPEDFATYFCQQFKSYPLTFGQGTKLEIK

SEQ ID NO: 109 - protein, 119 aa, Artificial Sequence
  source: /note="Description of Artificial Sequence: Synthetic polypeptide"
QVQLVQSGAEVKKPGSSVKVSCKASGTDFDKIYIHWVRQAPGQGLEWMGRVSAGSGNTKYNEKFKGRVTITADTSTSTAYMELSSLRSEDTAVYYCAGSYYSYDVLDYWGQGTTVTVSS

SEQ ID NO: 110 - protein, 246 aa, Artificial Sequence
  source: /note="Description of Artificial Sequence: Synthetic polypeptide"
QVQLVQSGAEVKKPGSSVKVSCKASGTDFKLTYIHWVRQAPGQGLEWMGRIFPGSGNVKYNEKFKGRVTITADTSTSTAYMELSSLRSEDTAVYYCAGSYYSYDVLDYWGQGTTVTVSSGGGGSGGGGSGGGGSGGGGSDIQMTQSPSFLSASVGDRVTITCKASQNVDNRVAWYQQKPGKAPKALIYSSSHRYKGVPSRFSGSGSGTEFTLTISSLQPEDFATYFCQQFKSYPLTFGQGTKLEIK

SEQ ID NO: 111 - protein, 107 aa, Artificial Sequence; identical to SEQ ID NO: 90
  source: /note="Description of Artificial Sequence: Synthetic polypeptide"

SEQ ID NO: 112 - protein, 119 aa, Artificial Sequence; identical to SEQ ID NO: 94
  source: /note="Description of Artificial Sequence: Synthetic polypeptide"

SEQ ID NO: 113 - protein, 246 aa, Artificial Sequence
  source: /note="Description of Artificial Sequence: Synthetic polypeptide"
QVQLVQSGAEVKKPGSSVKVSCKASGTDFDKIYIHWVRQAPGQGLEWMGRISAGSGNTKYNEKFKGRVTITADTSTSTAYMELSSLRSEDTAVYYCAGSYYSYDVLDYWGQGTTVTVSSGGGGSGGGGSGGGGSGGGGSDIQMTQSPSFLSASVGDRVTITCKASQNVDDRVAWYQQKPGKAPKALIYSSSHRYKGVPSRFSGSGSGTEFTLTISSLQPEDFATYFCQQFKSYPLTFGQGTKLEIK

SEQ ID NO: 114 - protein, 107 aa, Artificial Sequence; identical to SEQ ID NO: 87
  source: /note="Description of Artificial Sequence: Synthetic polypeptide"

SEQ ID NO: 115 - protein, 119 aa, Artificial Sequence
  source: /note="Description of Artificial Sequence: Synthetic polypeptide"
QVQLVQSGAEVKKPGSSVKVSCKASGTDFDKIYIHWVRQAPGQGLEWMGRISAGSGNTKYNEKFKGRVTITADTSTSTAYMELSSLRSEDTAVYYCAGSYYSYDVLDYWGQGTTVTVSS

SEQ ID NO: 116 - protein, 246 aa, Artificial Sequence
  source: /note="Description of Artificial Sequence: Synthetic polypeptide"
QVQLVQSGAEVKKPGSSVKVSCKASGTDFRLTYIHWVRQAPGQGLEWMGRVSPGSGNTKYNEKFKGRVTITADTSTSTAYMELSSLRSEDTAVYYCAGSYYSYDVLDYWGQGTTVTVSSGGGGSGGGGSGGGGSGGGGSDIQMTQSPSFLSASVGDRVTITCKASQNVDNKVAWHQQKPGKAPKALIYSSSHRYKGVPSRFSGSGSGTEFTLTISSLQPEDFATYFCQQFKSYPLTFGQGTKLEIK

SEQ ID NO: 117 - protein, 107 aa, Artificial Sequence
  source: /note="Description of Artificial Sequence: Synthetic polypeptide"
DIQMTQSPSFLSASVGDRVTITCKASQNVDNKVAWHQQKPGKAPKALIYSSSHRYKGVPSRFSGSGSGTEFTLTISSLQPEDFATYFCQQFKSYPLTFGQGTKLEIK

SEQ ID NO: 118 - protein, 119 aa, Artificial Sequence
  source: /note="Description of Artificial Sequence: Synthetic polypeptide"
QVQLVQSGAEVKKPGSSVKVSCKASGTDFRLTYIHWVRQAPGQGLEWMGRVSPGSGNTKYNEKFKGRVTITADTSTSTAYMELSSLRSEDTAVYYCAGSYYSYDVLDYWGQGTTVTVSS

SEQ ID NO: 119 - protein, 246 aa, Artificial Sequence
  source: /note="Description of Artificial Sequence: Synthetic polypeptide"
QVQLVQSGAEVKKPGSSVKVSCKASGGTFRLTYIHWVRQAPGQGLEWMGRVYPGSGNTKYNEKFKGRVTITADTSTSTAYMELSSLRSEDTAVYYCAGSYYSYDVLDYWGQGTTVTVSSGGGGSGGGGSGGGGSGGGGSDIQMTQSPSFLSASVGDRVTITCKASQNVDDRVAWYQQKPGKAPKALIYSSSHRYKGVPSRFSGSGSGTEFTLTISSLQPEDFATYFCQQFKSYPLTFGQGTKLEIK

SEQ ID NO: 120 - protein, 107 aa, Artificial Sequence; identical to SEQ ID NO: 87
  source: /note="Description of Artificial Sequence: Synthetic polypeptide"

SEQ ID NO: 121 - protein, 119 aa, Artificial Sequence
  source: /note="Description of Artificial Sequence: Synthetic polypeptide"
QVQLVQSGAEVKKPGSSVKVSCKASGGTFRLTYIHWVRQAPGQGLEWMGRVYPGSGNTKYNEKFKGRVTITADTSTSTAYMELSSLRSEDTAVYYCAGSYYSYDVLDYWGQGTTVTVSS

SEQ ID NO: 122 - protein, 246 aa, Artificial Sequence
  source: /note="Description of Artificial Sequence: Synthetic polypeptide"
QVQLVQSGAEVKKPGSSVKVSCKASGTDFRLTYIHWVRQAPGQGLEWMGRIFPGSGNTKYNEKFKGRVTITADTSTSTAYMELSSLRSEDTAVYYCAGSYYSYDVLDYWGQGTTVTVSSGGGGSGGGGSGGGGSGGGGSDIQMTQSPSFLSASVGDRVTITCKASQNVDDRVAWYQQKPGKAPKALIYSSSHRYKGVPSRFSGSGSGTEFTLTISSLQPEDFATYFCQQFKSYPLTFGQGTKLEIK

SEQ ID NO: 123 - protein, 107 aa, Artificial Sequence; identical to SEQ ID NO: 87
  source: /note="Description of Artificial Sequence: Synthetic polypeptide"

SEQ ID NO: 124 - protein, 119 aa, Artificial Sequence
  source: /note="Description of Artificial Sequence: Synthetic polypeptide"
QVQLVQSGAEVKKPGSSVKVSCKASGTDFRLTYIHWVRQAPGQGLEWMGRIFPGSGNTKYNEKFKGRVTITADTSTSTAYMELSSLRSEDTAVYYCAGSYYSYDVLDYWGQGTTVTVSS

SEQ ID NO: 125 - protein, 246 aa, Artificial Sequence
  source: /note="Description of Artificial Sequence: Synthetic polypeptide"
QVQLVQSGAEVKKPGSSVKVSCKASGTDFKLTYIHWVRQAPGQGLEWMGRIFPGSGNVKYNEKFKGRVTITADTSTSTAYMELSSLRSEDTAVYYCAGSYYSYDVLDYWGQGTTVTVSSGGGGSGGGGSGGGGSGGGGSDIQMTQSPSFLSASVGDRVTITCKASQNVEDRVAWYQQKPGKAPKALIYSSSHRYKGVPSRFSGSGSGTEFTLTISSLQPEDFATYFCQQFKSYPLTFGQGTKLEIK

SEQ ID NO: 126 - protein, 107 aa, Artificial Sequence; identical to SEQ ID NO: 81
  source: /note="Description of Artificial Sequence: Synthetic polypeptide"

SEQ ID NO: 127 - protein, 119 aa, Artificial Sequence; identical to SEQ ID NO: 94
  source: /note="Description of Artificial Sequence: Synthetic polypeptide"

SEQ ID NO: 128 - protein, 246 aa, Artificial Sequence
  source: /note="Description of Artificial Sequence: Synthetic polypeptide"
QVQLVQSGAEVKKPGSSVKVSCKASGGTFRLTYIHWVRQAPGQGLEWMGRISAGSGNVKYNEKFKGRVTITADTSTSTAYMELSSLRSEDTAVYYCAGSYYSYDVLDYWGQGTTVTVSSGGGGSGGGGSGGGGSGGGGSDIQMTQSPSFLSASVGDRVTITCKASQNVGDRVAWYQQKPGKAPKALIYSSSHRYKGVPSRFSGSGSGTEFTLTISSLQPEDFATYFCQQFKSYPLTFGQGTKLEIK

SEQ ID NO: 129 - protein, 107 aa, Artificial Sequence; identical to SEQ ID NO: 102
  source: /note="Description of Artificial Sequence: Synthetic polypeptide"

SEQ ID NO: 130 - protein, 119 aa, Artificial Sequence
  source: /note="Description of Artificial Sequence: Synthetic polypeptide"
QVQLVQSGAEVKKPGSSVKVSCKASGGTFRLTYIHWVRQAPGQGLEWMGRISAGSGNVKYNEKFKGRVTITADTSTSTAYMELSSLRSEDTAVYYCAGSYYSYDVLDYWGQGTTVTVSS

SEQ ID NO: 131 - protein, 246 aa, Artificial Sequence
  source: /note="Description of Artificial Sequence: Synthetic polypeptide"
QVQLVQSGAEVKKPGSSVKVSCKASGGTFDKTYIHWVRQAPGQGLEWMGRISAGSGNTKYNEKFKGRVTITADTSTSTAYMELSSLRSEDTAVYYCAGSYYSYDVLDYWGQGTTVTVSSGGGGSGGGGSGGGGSGGGGSDIQMTQSPSFLSASVGDRVTITCKASQNVDDRVAWYQQKPGKAPKALIYSSSHRYKGVPSRFSGSGSGTEFTLTISSLQPEDFATYFCQQFKSYPLTFGQGTKLEIK

SEQ ID NO: 132 - protein, 107 aa, Artificial Sequence; identical to SEQ ID NO: 87
  source: /note="Description of Artificial Sequence: Synthetic polypeptide"

SEQ ID NO: 133 - protein, 119 aa, Artificial Sequence
  source: /note="Description of Artificial Sequence: Synthetic polypeptide"
QVQLVQSGAEVKKPGSSVKVSCKASGGTFDKTYIHWVRQAPGQGLEWMGRISAGSGNTKYNEKFKGRVTITADTSTSTAYMELSSLRSEDTAVYYCAGSYYSYDVLDYWGQGTTVTVSS

SEQ ID NO: 134 - protein, 246 aa, Artificial Sequence
  source: /note="Description of Artificial Sequence: Synthetic polypeptide"
QVQLVQSGAEVKKPGSSVKVSCKASGHDFDKFYIHWVRQAPGQGLEWMGRISAGSGNTKYNEKFKGRVTITADTSTSTAYMELSSLRSEDTAVYYCAGSYYSYDVLDYWGQGTTVTVSSGGGGSGGGGSGGGGSGGGGSDIQMTQSPSFLSASVGDRVTITCKASQNVDDRVAWYQQKPGKAPKALIYSSSHRYKGVPSRFSGSGSGTEFTLTISSLQPEDFATYFCQQFKSYPLTFGQGTKLEIK

SEQ ID NO: 135 - protein, 107 aa, Artificial Sequence; identical to SEQ ID NO: 87
  source: /note="Description of Artificial Sequence: Synthetic polypeptide"

SEQ ID NO: 136 - protein, 119 aa, Artificial Sequence
  source: /note="Description of Artificial Sequence: Synthetic polypeptide"
QVQLVQSGAEVKKPGSSVKVSCKASGHDFDKFYIHWVRQAPGQGLEWMGRISAGSGNTKYNEKFKGRVTITADTSTSTAYMELSSLRSEDTAVYYCAGSYYSYDVLDYWGQGTTVTVSS

SEQ ID NO: 137 - protein, 246 aa, Artificial Sequence
  source: /note="Description of Artificial Sequence: Synthetic polypeptide"
QVQLVQSGAEVKKPGSSVKVSCKASGTDFKLTYIHWVRQAPGQGLEWMGRISAGSGNVKYNEKFKGRVTITADTSTSTAYMELSSLRSEDTAVYYCAGSYYSYDVLDYWGQGTTVTVSSGGGGSGGGGSGGGGSGGGGSDIQMTQSPSFLSASVGDRVTITCKASQNVDNKVAWHQQKPGKAPKALIYSSSHRYKGVPSRFSGSGSGTEFTLTISSLQPEDFATYFCQQFKSYPLTFGQGTKLEIK

SEQ ID NO: 138 - protein, 107 aa, Artificial Sequence; identical to SEQ ID NO: 117
  source: /note="Description of Artificial Sequence: Synthetic polypeptide"

SEQ ID NO: 139 - protein, 119 aa, Artificial Sequence
  source: /note="Description of Artificial Sequence: Synthetic polypeptide"
QVQLVQSGAEVKKPGSSVKVSCKASGTDFKLTYIHWVRQAPGQGLEWMGRISAGSGNVKYNEKFKGRVTITADTSTSTAYMELSSLRSEDTAVYYCAGSYYSYDVLDYWGQGTTVTVSS

SEQ ID NO: 140 - protein, 246 aa, Artificial Sequence
  source: /note="Description of Artificial Sequence: Synthetic polypeptide"
QVQLVQSGAEVKKPGSSVKVSCKASGHDFRLTYIHWVRQAPGQGLEWMGRISAGSGNVKYNEKFKGRVTITADTSTSTAYMELSSLRSEDTAVYYCAGSYYSYDVLDYWGQGTTVTVSSGGGGSGGGGSGGGGSGGGGSDIQMTQSPSFLSASVGDRVTITCKASQNVADRVAWYQQKPGKAPKALIYSSSHRYKGVPSRFSGSGSGTEFTLTISSLQPEDFATYFCQQFKSYPLTFGQGTKLEIK

SEQ ID NO: 141 - protein, 107 aa, Artificial Sequence
  source: /note="Description of Artificial Sequence: Synthetic polypeptide"
DIQMTQSPSFLSASVGDRVTITCKASQNVADRVAWYQQKPGKAPKALIYSSSHRYKGVPSRFSGSGSGTEFTLTISSLQPEDFATYFCQQFKSYPLTFGQGTKLEIK

SEQ ID NO: 142 - protein, 119 aa, Artificial Sequence
  source: /note="Description of Artificial Sequence: Synthetic polypeptide"
QVQLVQSGAEVKKPGSSVKVSCKASGHDFRLTYIHWVRQAPGQGLEWMGRISAGSGNVKYNEKFKGRVTITADTSTSTAYMELSSLRSEDTAVYYCAGSYYSYDVLDYWGQGTTVTVSS

SEQ ID NO: 143 - protein, 246 aa, Artificial Sequence
  source: /note="Description of Artificial Sequence: Synthetic polypeptide"
QVQLVQSGAEVKKPGSSVKVSCKASGHDFHLWYIHWVRQAPGQGLEWMGRVSAGSGNVKYNEKFKGRVTITADTSTSTAYMELSSLRSEDTAVYYCAGSYYSYDVLDYWGQGTTVTVSSGGGGSGGGGSGGGGSGGGGSDIQMTQSPSFLSASVGDRVTITCKASQNVDNKVAWHQQKPGKAPKALIYSSSHRYKGVPSRFSGSGSGTEFTLTISSLQPEDFATYFCQQFKSYPLTFGQGTKLEIK

SEQ ID NO: 144 - protein, 107 aa, Artificial Sequence; identical to SEQ ID NO: 117
  source: /note="Description of Artificial Sequence: Synthetic polypeptide"

SEQ ID NO: 145 - protein, 119 aa, Artificial Sequence
  source: /note="Description of Artificial Sequence: Synthetic polypeptide"
QVQLVQSGAEVKKPGSSVKVSCKASGHDFHLWYIHWVRQAPGQGLEWMGRVSAGSGNVKYNEKFKGRVTITADTSTSTAYMELSSLRSEDTAVYYCAGSYYSYDVLDYWGQGTTVTVSS

SEQ ID NO: 146 - protein, 246 aa, Artificial Sequence
  source: /note="Description of Artificial Sequence: Synthetic polypeptide"
QVQLVQSGAEVKKPGSSVKVSCKASGHDFHLWYIHWVRQAPGQGLEWMGRVFAGSGNTKYNEKFKGRVTITADTSTSTAYMELSSLRSEDTAVYYCAGSYYSYDVLDYWGQGTTVTVSSGGGGSGGGGSGGGGSGGGGSDIQMTQSPSFLSASVGDRVTITCKASQNVEDKVAWYQQKPGKAPKALIYSSSHRYKGVPSRFSGSGSGTEFTLTISSLQPEDFATYFCQQFKSYPLTFGQGTKLEIK

SEQ ID NO: 147 - protein, 107 aa, Artificial Sequence
  source: /note="Description of Artificial Sequence: Synthetic polypeptide"
DIQMTQSPSFLSASVGDRVTITCKASQNVEDKVAWYQQKPGKAPKALIYSSSHRYKGVPSRFSGSGSGTEFTLTISSLQPEDFATYFCQQFKSYPLTFGQGTKLEIK

SEQ ID NO: 148 - protein, 119 aa, Artificial Sequence
  source: /note="Description of Artificial Sequence: Synthetic polypeptide"
QVQLVQSGAEVKKPGSSVKVSCKASGHDFHLWYIHWVRQAPGQGLEWMGRVFAGSGNTKYNEKFKGRVTITADTSTSTAYMELSSLRSEDTAVYYCAGSYYSYDVLDYWGQGTTVTVSS

SEQ ID NO: 149 - protein, 246 aa, Artificial Sequence
  source: /note="Description of Artificial Sequence: Synthetic polypeptide"
QVQLVQSGAEVKKPGSSVKVSCKASGTDFKLTYIHWVRQAPGQGLEWMGRIFPGSGNTKYNEKFKGRVTITADTSTSTAYMELSSLRSEDTAVYYCAGSYYSYDVLDYWGQGTTVTVSSGGGGSGGGGSGGGGSGGGGSDIQMTQSPSFLSASVGDRVTITCKASQNVDDRVAWYQQKPGKAPKALIYSSSHRYKGVPSRFSGSGSGTEFTLTISSLQPEDFATYFCQQFKSYPLTFGQGTKLEIK

SEQ ID NO: 150 - protein, 107 aa, Artificial Sequence; identical to SEQ ID NO: 87
  source: /note="Description of Artificial Sequence: Synthetic polypeptide"

SEQ ID NO: 151 - protein, 119 aa, Artificial Sequence
  source: /note="Description of Artificial Sequence: Synthetic polypeptide"
QVQLVQSGAEVKKPGSSVKVSCKASGTDFKLTYIHWVRQAPGQGLEWMGRIFPGSGNTKYNEKFKGRVTITADTSTSTAYMELSSLRSEDTAVYYCAGSYYSYDVLDYWGQGTTVTVSS

SEQ ID NO: 152 - skipped

SEQ ID NO: 153 - protein, 246 aa, Artificial Sequence
  source: /note="Description of Artificial Sequence: Synthetic polypeptide"
QVQLVQSGAEVKKPGSSVKVSCKASGTDFKLTYIHWVRQAPGQGLEWMGRVSAGSGNVKYNEKFKGRVTITADTSTSTAYMELSSLRSEDTAVYYCAGSYYSYDVLDYWGQGTTVTVSSGGGGSGGGGSGGGGSGGGGSDIQMTQSPSFLSASVGDRVTITCKASQNVGNRVAWYQQKPGKAPKALIYSSSHRYKGVPSRFSGSGSGTEFTLTISSLQPEDFATYFCQQFKSYPLTFGQGTKLEIK

SEQ ID NO: 154 - protein, 107 aa, Artificial Sequence; identical to SEQ ID NO: 108
  source: /note="Description of Artificial Sequence: Synthetic polypeptide"

SEQ ID NO: 155 - protein, 119 aa, Artificial Sequence
  source: /note="Description of Artificial Sequence: Synthetic polypeptide"
QVQLVQSGAEVKKPGSSVKVSCKASGTDFKLTYIHWVRQAPGQGLEWMGRVSAGSGNVKYNEKFKGRVTITADTSTSTAYMELSSLRSEDTAVYYCAGSYYSYDVLDYWGQGTTVTVSS

SEQ ID NO: 156 - protein, 246 aa, Artificial Sequence
  source: /note="Description of Artificial Sequence: Synthetic polypeptide"
QVQLVQSGAEVKKPGSSVKVSCKASGTDFKLTYIHWVRQAPGQGLEWMGRISPGSGNTKYNEKFKGRVTITADTSTSTAYMELSSLRSEDTAVYYCAGSYYSYDVLDYWGQGTTVTVSSGGGGSGGGGSGGGGSGGGGSDIQMTQSPSFLSASVGDRVTITCKASQNVGDRVAWYQQKPGKAPKALIYSSSHRYKGVPSRFSGSGSGTEFTLTISSLQPEDFATYFCQQFKSYPLTFGQGTKLEIK

SEQ ID NO: 157 - protein, 107 aa, Artificial Sequence; identical to SEQ ID NO: 102
  source: /note="Description of Artificial Sequence: Synthetic polypeptide"

SEQ ID NO: 158 - protein, 119 aa, Artificial Sequence
  source: /note="Description of Artificial Sequence: Synthetic polypeptide"
QVQLVQSGAEVKKPGSSVKVSCKASGTDFKLTYIHWVRQAPGQGLEWMGRISPGSGNTKYNEKFKGRVTITADTSTSTAYMELSSLRSEDTAVYYCAGSYYSYDVLDYWGQGTTVTVSS

SEQ ID NO: 159 - protein, 246 aa, Artificial Sequence
  source: /note="Description of Artificial Sequence: Synthetic polypeptide"
QVQLVQSGAEVKKPGSSVKVSCKASGHDFHLWYIHWVRQAPGQGLEWMGRISPGSGNVKYNEKFKGRVTITADTSTSTAYMELSSLRSEDTAVYYCAGSYYSYDVLDYWGQGTTVTVSSGGGGSGGGGSGGGGSGGGGSDIQMTQSPSFLSASVGDRVTITCKASQNVGDRVAWHQQKPGKAPKALIYSSSHRYKGVPSRFSGSGSGTEFTLTISSLQPEDFATYFCQQFKSYPLTFGQGTKLEIK

SEQ ID NO: 160 - protein, 107 aa, Artificial Sequence
  source: /note="Description of Artificial Sequence: Synthetic polypeptide"
DIQMTQSPSFLSASVGDRVTITCKASQNVGDRVAWHQQKPGKAPKALIYSSSHRYKGVPSRFSGSGSGTEFTLTISSLQPEDFATYFCQQFKSYPLTFGQGTKLEIK

SEQ ID NO: 161 - protein, 119 aa, Artificial Sequence
  source: /note="Description of Artificial Sequence: Synthetic polypeptide"
QVQLVQSGAEVKKPGSSVKVSCKASGHDFHLWYIHWVRQAPGQGLEWMGRISPGSGNVKYNEKFKGRVTITADTSTSTAYMELSSLRSEDTAVYYCAGSYYSYDVLDYWGQGTTVTVSS

SEQ ID NO: 162 - protein, 246 aa, Artificial Sequence
  source: /note="Description of Artificial Sequence: Synthetic polypeptide"
QVQLVQSGAEVKKPGSSVKVSCKASGHDFKLTYIHWVRQAPGQGLEWMGRISAGSGNVKYNEKFKGRVTITADTSTSTAYMELSSLRSEDTAVYYCAGSYYSYDVLDYWGQGTTVTVSSGGGGSGGGGSGGGGSGGGGSDIQMTQSPSFLSASVGDRVTITCKASQNVDDRVAWYQQKPGKAPKALIYSSSHRYKGVPSRFSGSGSGTEFTLTISSLQPEDFATYFCQQFKSYPLTFGQGTKLEIK

SEQ ID NO: 163 - protein, 107 aa, Artificial Sequence; identical to SEQ ID NO: 87
  source: /note="Description of Artificial Sequence: Synthetic polypeptide"

SEQ ID NO: 164 - protein, 119 aa, Artificial Sequence; identical to SEQ ID NO: 91
  source: /note="Description of Artificial Sequence: Synthetic polypeptide"

SEQ ID NO: 165 - protein, 246 aa, Artificial Sequence
  source: /note="Description of Artificial Sequence: Synthetic polypeptide"
QVQLVQSGAEVKKPGSSVKVSCKASGTDFHLWYIHWVRQAPGQGLEWMGRVFAGSGSYRYNEKFKGRVTITADTSTSTAYMELSSLRSEDTAVYYCAGSYYSYDVLDYWGQGTTVTVSSGGGGSGGGGSGGGGSGGGGSDIQMTQSPSFLSASVGDRVTITCKASQNVDDRVAWYQQKPGKAPKALIYSSSHRYKGVPSRFSGSGSGTEFTLTISSLQPEDFATYFCQQFKSYPLTFGQGTKLEIK

SEQ ID NO: 166 - protein, 107 aa, Artificial Sequence; identical to SEQ ID NO: 87
  source: /note="Description of Artificial Sequence: Synthetic polypeptide"

SEQ ID NO: 167 - protein, 119 aa, Artificial Sequence
  source: /note="Description of Artificial Sequence: Synthetic polypeptide"
QVQLVQSGAEVKKPGSSVKVSCKASGTDFHLWYIHWVRQAPGQGLEWMGRVFAGSGSYRYNEKFKGRVTITADTSTSTAYMELSSLRSEDTAVYYCAGSYYSYDVLDYWGQGTTVTVSS

SEQ ID NO: 168 - protein, 246 aa, Artificial Sequence
  source: /note="Description of Artificial Sequence: Synthetic polypeptide"
QVQLVQSGAEVKKPGSSVKVSCKASGTDFDKIYIHWVRQAPGQGLEWMGRISAGSGNTKYNEKFKGRVTITADTSTSTAYMELSSLRSEDTAVYYCAGSYYSYDVLDYWGQGTTVTVSSGGGGSGGGGSGGGGSGGGGSDIQMTQSPSFLSASVGDRVTITCKASQNVADRVAWYQQKPGKAPKALIYSSSHRYKGVPSRFSGSGSGTEFTLTISSLQPEDFATYFCQQFKSYPLTFGQGTKLEIK

SEQ ID NO: 169 - protein, 107 aa, Artificial Sequence; identical to SEQ ID NO: 141
  source: /note="Description of Artificial Sequence: Synthetic polypeptide"

SEQ ID NO: 170 - protein, 119 aa, Artificial Sequence; identical to SEQ ID NO: 115
  source: /note="Description of Artificial Sequence: Synthetic polypeptide"

SEQ ID NO: 171 - protein, 246 aa, Artificial Sequence
  source: /note="Description of Artificial Sequence: Synthetic polypeptide"
QVQLVQSGAEVKKPGSSVKVSCKASGTDFKLTYIHWVRQAPGQGLEWMGRISAGSGNTKYNEKFKGRVTITADTSTSTAYMELSSLRSEDTAVYYCAGSYYSYDVLDYWGQGTTVTVSSGGGGSGGGGSGGGGSGGGGSDIQMTQSPSFLSASVGDRVTITCKASQNVEDRVAWYQQKPGKAPKALIYSSSHRYKGVPSRFSGSGSGTEFTLTISSLQPEDFATYFCQQFKSYPLTFGQGTKLEIK

SEQ ID NO: 172 - protein, 107 aa, Artificial Sequence; identical to SEQ ID NO: 81
  source: /note="Description of Artificial Sequence: Synthetic polypeptide"

SEQ ID NO: 173 - protein, 119 aa, Artificial Sequence
  source: /note="Description of Artificial Sequence: Synthetic polypeptide"
QVQLVQSGAEVKKPGSSVKVSCKASGTDFKLTYIHWVRQAPGQGLEWMGRISAGSGNTKYNEKFKGRVTITADTSTSTAYMELSSLRSEDTAVYYCAGSYYSYDVLDYWGQGTTVTVSS

SEQ ID NO: 174 - protein, 246 aa, Artificial Sequence
  source: /note="Description of Artificial Sequence: Synthetic polypeptide"
QVQLVQSGAEVKKPGSSVKVSCKASGTDFRLTYIHWVRQAPGQGLEWMGRISPGSGNTKYNEKFKGRVTITADTSTSTAYMELSSLRSEDTAVYYCAGSYYSYDVLDYWGQGTTVTVSSGGGGSGGGGSGGGGSGGGGSDIQMTQSPSFLSASVGDRVTITCKASQNVGNRVAWYQQKPGKAPKALIYSSSHRYKGVPSRFSGSGSGTEFTLTISSLQPEDFATYFCQQFKSYPLTFGQGTKLEIK

SEQ ID NO: 175 - protein, 107 aa, Artificial Sequence; identical to SEQ ID NO: 108
  source: /note="Description of Artificial Sequence: Synthetic polypeptide"

SEQ ID NO: 176 - protein, 119 aa, Artificial Sequence
  source: /note="Description of Artificial Sequence: Synthetic polypeptide"
QVQLVQSGAEVKKPGSSVKVSCKASGTDFRLTYIHWVRQAPGQGLEWMGRISPGSGNTKYNEKFKGRVTITADTSTSTAYMELSSLRSEDTAVYYCAGSYYSYDVLDYWGQGTTVTVSS

SEQ ID NO: 177 - protein, 246 aa, Artificial Sequence
  source: /note="Description of Artificial Sequence: Synthetic polypeptide"
QVQLVQSGAEVKKPGSSVKVSCKASGHDFDKTYIHWVRQAPGQGLEWMGRVSAGSGNVKYNEKFKGRVTITADTSTSTAYMELSSLRSEDTAVYYCAGSYYSYDVLDYWGQGTTVTVSSGGGGSGGGGSGGGGSGGGGSDIQMTQSPSFLSASVGDRVTITCKASQNVEDRVAWYQQKPGKAPKALIYSSSHRYKGVPSRFSGSGSGTEFTLTISSLQPEDFATYFCQQFKSYPLTFGQGTKLEIK

SEQ ID NO: 178 - protein, 107 aa, Artificial Sequence; identical to SEQ ID NO: 81
  source: /note="Description of Artificial Sequence: Synthetic polypeptide"

SEQ ID NO: 179 - protein, 119 aa, Artificial Sequence
  source: /note="Description of Artificial Sequence: Synthetic polypeptide"
QVQLVQSGAEVKKPGSSVKVSCKASGHDFDKTYIHWVRQAPGQGLEWMGRVSAGSGNVKYNEKFKGRVTITADTSTSTAYMELSSLRSEDTAVYYCAGSYYSYDVLDYWGQGTTVTVSS

SEQ ID NO: 180 - protein, 246 aa, Artificial Sequence
  source: /note="Description of Artificial Sequence: Synthetic polypeptide"
QVQLVQSGAEVKKPGSSVKVSCKASGHDFKLTYIHWVRQAPGQGLEWMGRVSPGSGNTKYNEKFKGRVTITADTSTSTAYMELSSLRSEDTAVYYCAGSYYSYDVLDYWGQGTTVTVSSGGGGSGGGGSGGGGSGGGGSDIQMTQSPSFLSASVGDRVTITCKASQNVEDRVAWHQQKPGKAPKALIYSSSHRYKGVPSRFSGSGSGTEFTLTISSLQPEDFATYFCQQFKSYPLTFGQGTKLEIK

SEQ ID NO: 181 - protein, 107 aa, Artificial Sequence
  source: /note="Description of Artificial Sequence: Synthetic polypeptide"
DIQMTQSPSFLSASVGDRVTITCKASQNVEDRVAWHQQKPGKAPKALIYSSSHRYKGVPSRFSGSGSGTEFTLTISSLQPEDFATYFCQQFKSYPLTFGQGTKLEIK

SEQ ID NO: 182 - protein, 119 aa, Artificial Sequence
  source: /note="Description of Artificial Sequence: Synthetic polypeptide"
QVQLVQSGAEVKKPGSSVKVSCKASGHDFKLTYIHWVRQAPGQGLEWMGRVSPGSGNTKYNEKFKGRVTITADTSTSTAYMELSSLRSEDTAVYYCAGSYYSYDVLDYWGQGTTVTVSS

SEQ ID NO: 183 - protein, 246 aa, Artificial Sequence
  source: /note="Description of Artificial Sequence: Synthetic polypeptide"
QVQLVQSGAEVKKPGSSVKVSCKASGHDFDKTYIHWVRQAPGQGLEWMGRIYPGSGNVKYNEKFKGRVTITADTSTSTAYMELSSLRSEDTAVYYCAGSYYSYDVLDYWGQGTTVTVSSGGGGSGGGGSGGGGSGGGGSDIQMTQSPSFLSASVGDRVTITCKASQNVADRVAWYQQKPGKAPKALIYSSSHRYKGVPSRFSGSGSGTEFTLTISSLQPEDFATYFCQQFKSYPLTFGQGTKLEIK

SEQ ID NO: 184 - protein, 107 aa, Artificial Sequence; identical to SEQ ID NO: 141
  source: /note="Description of Artificial Sequence: Synthetic polypeptide"

SEQ ID NO: 185 - protein, 119 aa, Artificial Sequence
  source: /note="Description of Artificial Sequence: Synthetic polypeptide"
QVQLVQSGAEVKKPGSSVKVSCKASGHDFDKTYIHWVRQAPGQGLEWMGRIYPGSGNVKYNEKFKGRVTITADTSTSTAYMELSSLRSEDTAVYYCAGSYYSYDVLDYWGQGTTVTVSS

SEQ ID NO: 186 - protein, 246 aa, Artificial Sequence
  source: /note="Description of Artificial Sequence: Synthetic polypeptide"
QVQLVQSGAEVKKPGSSVKVSCKASGTDFDKTYIHWVRQAPGQGLEWMGRISAGSGNVKYNEKFKGRVTITADTSTSTAYMELSSLRSEDTAVYYCAGSYYSYDVLDYWGQGTTVTVSSGGGGSGGGGSGGGGSGGGGSDIQMTQSPSFLSASVGDRVTITCKASQNVDDRVAWYQQKPGKAPKALIYSSSHRYKGVPSRFSGSGSGTEFTLTISSLQPEDFATYFCQQFKSYPLTFGQGTKLEIK

SEQ ID NO: 187 - protein, 107 aa, Artificial Sequence; identical to SEQ ID NO: 87
  source: /note="Description of Artificial Sequence: Synthetic polypeptide"

SEQ ID NO: 188 - protein, 119 aa, Artificial Sequence
  source: /note="Description of Artificial Sequence: Synthetic polypeptide"
QVQLVQSGAEVKKPGSSVKVSCKASGTDFDKTYIHWVRQAPGQGLEWMGRISAGSGNVKYNEKFKGRVTITADTSTSTAYMELSSLRSEDTAVYYCAGSYYSYDVLDYWGQGTTVTVSS

SEQ ID NO: 189 - protein, 246 aa, Artificial Sequence
  source: /note="Description of Artificial Sequence: Synthetic polypeptide"
QVQLVQSGAEVKKPGSSVKVSCKASGTDFDKIYIHWVRQAPGQGLEWMGRISAGSGNIKYNEKFKGRVTITADTSTSTAYMELSSLRSEDTAVYYCAGSYYSYDVLDYWGQGTTVTVSSGGGGSGGGGSGGGGSGGGGSDIQMTQSPSFLSASVGDRVTITCKASQNVDDRVAWYQQKPGKAPKALIYSSSHRYKGVPSRFSGSGSGTEFTLTISSLQPEDFATYFCQQFKSYPLTFGQGTKLEIK

SEQ ID NO: 190 - protein, 107 aa, Artificial Sequence; identical to SEQ ID NO: 87
  source: /note="Description of Artificial Sequence: Synthetic polypeptide"

SEQ ID NO: 191 - protein, 119 aa, Artificial Sequence
  source: /note="Description of Artificial Sequence: Synthetic polypeptide"
QVQLVQSGAEVKKPGSSVKVSCKASGTDFDKIYIHWVRQAPGQGLEWMGRISAGSGNIKYNEKFKGRVTITADTSTSTAYMELSSLRSEDTAVYYCAGSYYSYDVLDYWGQGTTVTVSS

SEQ ID NO: 192 - protein, 246 aa, Artificial Sequence
  source: /note="Description of Artificial Sequence: Synthetic polypeptide"
QVQLVQSGAEVKKPGSSVKVSCKASGTDFDKIYIHWVRQAPGQGLEWMGRISAGSGNVKYNEKFKGRVTITADTSTSTAYMELSSLRSEDTAVYYCAGSYYSYDVLDYWGQGTTVTVSSGGGGSGGGGSGGGGSGGGGSDIQMTQSPSFLSASVGDRVTITCKASQNVGDRVAWYQQKPGKAPKALIYSSSHRYKGVPSRFSGSGSGTEFTLTISSLQPEDFATYFCQQFKSYPLTFGQGTKLEIK

SEQ ID NO: 193 - protein, 107 aa, Artificial Sequence; identical to SEQ ID NO: 102
  source: /note="Description of Artificial Sequence: Synthetic polypeptide"

SEQ ID NO: 194 - protein, 119 aa, Artificial Sequence; identical to SEQ ID NO: 85
  source: /note="Description of Artificial Sequence: Synthetic polypeptide"

SEQ ID NO: 195 - protein, 246 aa, Artificial Sequence
  source: /note="Description of Artificial Sequence: Synthetic polypeptide"
QVQLVQSGAEVKKPGSSVKVSCKASGGTFKLTYIHWVRQAPGQGLEWMGRVSAGSGNVKYNEKFKGRVTITADTSTSTAYMELSSLRSEDTAVYYCAGSYYSYDVLDYWGQGTTVTVSSGGGGSGGGGSGGGGSGGGGSDIQMTQSPSFLSASVGDRVTITCKASQNVDDRVAWYQQKPGKAPKALIYSSSHRYKGVPSRFSGSGSGTEFTLTISSLQPEDFATYFCQQFKSYPLTFGQGTKLEIK

SEQ ID NO: 196 - protein, 107 aa, Artificial Sequence; identical to SEQ ID NO: 87
  source: /note="Description of Artificial Sequence: Synthetic polypeptide"

SEQ ID NO: 197 - protein, 119 aa, Artificial Sequence
  source: /note="Description of Artificial Sequence: Synthetic polypeptide"
QVQLVQSGAEVKKPGSSVKVSCKASGGTFKLTYIHWVRQAPGQGLEWMGRVSAGSGNVKYNEKFKGRVTITADTSTSTAYMELSSLRSEDTAVYYCAGSYYSYDVLDYWGQGTTVTVSS

SEQ ID NO: 198 - protein, 246 aa, Artificial Sequence
  source: /note="Description of Artificial Sequence: Synthetic polypeptide"
QVQLVQSGAEVKKPGSSVKVSCKASGTDFKLTYIHWVRQAPGQGLEWMGRISPGSGNVKYNEKFKGRVTITADTSTSTAYMELSSLRSEDTAVYYCAGSYYSYDVLDYWGQGTTVTVSSGGGGSGGGGSGGGGSGGGGSDIQMTQSPSFLSASVGDRVTITCKASQNVDNRVAWHQQKPGKAPKALIYSSSHRYKGVPSRFSGSGSGTEFTLTISSLQPEDFATYFCQQFKSYPLTFGQGTKLEIK

SEQ ID NO: 199 - protein, 107 aa, Artificial Sequence
  source: /note="Description of Artificial Sequence: Synthetic polypeptide"
DIQMTQSPSFLSASVGDRVTITCKASQNVDNRVAWHQQKPGKAPKALIYSSSHRYKGVPSRFSGSGSGTEFTLTISSLQPEDFATYFCQQFKSYPLTFGQGTKLEIK

SEQ ID NO: 200 - protein, 119 aa, Artificial Sequence
  source: /note="Description of Artificial Sequence: Synthetic polypeptide"
QVQLVQSGAEVKKPGSSVKVSCKASGTDFKLTYIHWVRQAPGQGLEWMGRISPGSGNVKYNEKFKGRVTITADTSTSTAYMELSSLRSEDTAVYYCAGSYYSYDVLDYWGQGTTVTVSS

SEQ ID NO: 201 - protein, 246 aa, Artificial Sequence
  source: /note="Description of Artificial Sequence: Synthetic polypeptide"
QVQLVQSGAEVKKPGSSVKVSCKASGHDFDKFYIHWVRQAPGQGLEWMGRVSAGSGNTKYNEKFKGRVTITADTSTSTAYMELSSLRSEDTAVYYCAGSYYSYDVLDYWGQGTTVTVSSGGGGSGGGGSGGGGSGGGGSDIQMTQSPSFLSASVGDRVTITCKASQNVDNRVAWYQQKPGKAPKALIYSSSHRYKGVPSRFSGSGSGTEFTLTISSLQPEDFATYFCQQFKSYPLTFGQGTKLEIK

SEQ ID NO: 202 - protein, 107 aa, Artificial Sequence; identical to SEQ ID NO: 90
  source: /note="Description of Artificial Sequence: Synthetic polypeptide"

SEQ ID NO: 203 - protein, 119 aa, Artificial Sequence
  source: /note="Description of Artificial Sequence: Synthetic polypeptide"
QVQLVQSGAEVKKPGSSVKVSCKASGHDFDKFYIHWVRQAPGQGLEWMGRVSAGSGNTKYNEKFKGRVTITADTSTSTAYMELSSLRSEDTAVYYCAGSYYSYDVLDYWGQGTTVTVSS

SEQ ID NO: 204 - protein, 246 aa, Artificial Sequence
  source: /note="Description of Artificial Sequence: Synthetic polypeptide"
QVQLVQSGAEVKKPGSSVKVSCKASGTDFDKFYIHWVRQAPGQGLEWMGRVSAGSGNVKYNEKFKGRVTITADTSTSTAYMELSSLRSEDTAVYYCAGSYYSYDVLDYWGQGTTVTVSSGGGGSGGGGSGGGGSGGGGSDIQMTQSPSFLSASVGDRVTITCKASQNVGDRVVWYQQKPGKAPKALIYSSSHRYKGVPSRFSGSGSGTEFTLTISSLQPEDFATYFCQQFKSYPLTFGQGTKLEIK

SEQ ID NO: 205 - protein, 119 aa, Artificial Sequence
  source: /note="Description of Artificial Sequence: Synthetic polypeptide"
QVQLVQSGAEVKKPGSSVKVSCKASGTDFDKFYIHWVRQAPGQGLEWMGRVSAGSGNVKYNEKFKGRVTITADTSTSTAYMELSSLRSEDTAVYYCAGSYYSYDVLDYWGQGTTVTVSS

SEQ ID NO: 206 - protein, 246 aa, Artificial Sequence
  source: /note="Description of Artificial Sequence: Synthetic polypeptide"
QVQLVQSGAEVKKPGSSVKVSCKASGYSFTTYYIHWVRQAPGQGLEWMGWFSAGSGNTKYNEKFKGRVTITADTSTSTAYMELSSLRSEDTAVYYCAVSYYSYDVLDYWGQGTTVTVSSGGGGSGGGGSGGGGSGGGGSDIQMTQSPSFLSASVGDRVTITCKASQNVGINVVWHQQKPGKAPKALIYSSSHRYSGVPSRFSGSGSGTEFTLTISSLQPEDFATYFCQQFKSYPLTFGQGTKLEIK

SEQ ID NO: 207 - protein, 119 aa, Artificial Sequence
  source: /note="Description of Artificial Sequence: Synthetic polypeptide"
QVQLVQSGAEVKKPGSSVKVSCKASGYSFTTYYIHWVRQAPGQGLEWMGWFSAGSGNTKYNEKFKGRVTITADTSTSTAYMELSSLRSEDTAVYYCAVSYYSYDVLDYWGQGTTVTVSS

SEQ ID NO: 208 - protein, 246 aa, Artificial Sequence
  source: /note="Description of Artificial Sequence: Synthetic polypeptide"
QVQLVQSGAEVKKPGSSVKVSCKASGYSFTTYYIHWVRQAPGQGLEWMGWFSAGSGNTKYNEKFKGRVTITADTSTSTAYMELSSLRSEDTAVYYCAGSYYSYDVLDYWGQGTTVTVSSGGGGSGGGGSGGGGSGGGGSDIQMTQSPSFLSASVGDRVTITCKASQNVGINVVWHQQKPGKAPKALIYSSSHRYSGVPSRFSGSGSGTEFTLTISSLQPEDFATYFCQQFKSYPLTFGQGTKLEIK

SEQ ID NO: 209 - protein, 119 aa, Artificial Sequence
  source: /note="Description of Artificial Sequence: Synthetic polypeptide"
QVQLVQSGAEVKKPGSSVKVSCKASGYSFTTYYIHWVRQAPGQGLEWMGWFSAGSGNTKYNEKFKGRVTITADTSTSTAYMELSSLRSEDTAVYYCAGSYYSYDVLDYWGQGTTVTVSS

SEQ ID NO: 210 - protein, 246 aa, Artificial Sequence
  source: /note="Description of Artificial Sequence: Synthetic polypeptide"
QVQLVQSGAEVKKPGSSVKVSCKASGYSFTTYYIHWVRQAPGQGLEWMGWFFPGSGNTKYNEKFKGRVTITADTSTSTAYMELSSLRSEDTAVYYCAGSYYSYDVLDYWGQGTTVTVSSGGGGSGGGGSGGGGSGGGGSDIQMTQSPSFLSASVGDRVTITCKASQNVGINVVWHQQKPGKAPKALIYSSSHRYSGVPSRFSGSGSGTEFTLTISSLQPEDFATYFCQQFKSYPLTFGQGTKLEIK

SEQ ID NO: 211 - protein, 119 aa, Artificial Sequence
  source: /note="Description of Artificial Sequence: Synthetic polypeptide"
QVQLVQSGAEVKKPGSSVKVSCKASGYSFTTYYIHWVRQAPGQGLEWMGWFFPGSGNTKYNEKFKGRVTITADTSTSTAYMELSSLRSEDTAVYYCAGSYYSYDVLDYWGQGTTVTVSS

SEQ ID NO: 212 - protein, 246 aa, Artificial Sequence
  source: /note="Description of Artificial Sequence: Synthetic polypeptide"
QVQLVQSGAEVKKPGSSVKVSCKASGYSFTTYYIHWVRQAPGQGLEWMGWFSPGSGNTKYNEKFKGRVTITADTSTSTAYMELSSLRSEDTAVYYCAVSYYSYDVLDYWGQGTTVTVSSGGGGSGGGGSGGGGSGGGGSDIQMTQSPSFLSASVGDRVTITCKASQNVGINVVWHQQKPGKAPKALIYSSSHRYSGVPSRFSGSGSGTEFTLTISSLQPEDFATYFCQQFKSYPLTFGQGTKLEIK

SEQ ID NO: 213 - protein, 119 aa, Artificial Sequence
  source: /note="Description of Artificial Sequence: Synthetic polypeptide"
QVQLVQSGAEVKKPGSSVKVSCKASGYSFTTYYIHWVRQAPGQGLEWMGWFSPGSGNTKYNEKFKGRVTITADTSTSTAYMELSSLRSEDTAVYYCAVSYYSYDVLDYWGQGTTVTVSS

SEQ ID NO: 214 - protein, 246 aa, Artificial Sequence
  source: /note="Description of Artificial Sequence: Synthetic polypeptide"
QVQLVQSGAEVKKPGSSVKVSCKASGYSFTTYYIHWVRQAPGQGLEWMGWFSPGSGNTKYNEKFKGRVTITADTSTSTAYMELSSLRSEDTAVYYCAGSYYSYDVLDYWGQGTTVTVSSGGGGSGGGGSGGGGSGGGGSDIQMTQSPSFLSASVGDRVTITCKASQNVGINVVWHQQKPGKAPKALIYSSSHRYSGVPSRFSGSGSGTEFTLTISSLQPEDFATYFCQQFKSYPLTFGQGTKLEIK

SEQ ID NO: 215 - protein, 119 aa, Artificial Sequence
  source: /note="Description of Artificial Sequence: Synthetic polypeptide"
QVQLVQSGAEVKKPGSSVKVSCKASGYSFTTYYIHWVRQAPGQGLEWMGWFSPGSGNTKYNEKFKGRVTITADTSTSTAYMELSSLRSEDTAVYYCAGSYYSYDVLDYWGQGTTVTVSS

SEQ ID NO: 216 - protein, 246 aa, Artificial Sequence
  source: /note="Description of Artificial Sequence: Synthetic polypeptide"
QVQLVQSGAEVKKPGSSVKVSCKASGYSFTTYYIHWVRQAPGQGLEWMGRIFPGSGNIKYNEKFKGRVTITADTSTSTAYMELSSLRSEDTAVYYCAGSYYSYDVLDYWGQGTTVTVSSGGGGSGGGGSGGGGSGGGGSDIQMTQSPSFLSASVGDRVTITCKASQNVGINVVWHQQKPGKAPKALIYSSSHRYSGVPSRFSGSGSGTEFTLTISSLQPEDFATYFCQQFKSYPLTFGQGTKLEIK

SEQ ID NO: 217 - protein, 119 aa, Artificial Sequence
  source: /note="Description of Artificial Sequence: Synthetic polypeptide"
QVQLVQSGAEVKKPGSSVKVSCKASGYSFTTYYIHWVRQAPGQGLEWMGRIFPGSGNIKYNEKFKGRVTITADTSTSTAYMELSSLRSEDTAVYYCAGSYYSYDVLDYWGQGTTVTVSS

SEQ ID NO: 218 - protein, 246 aa, Artificial Sequence
  source: /note="Description of Artificial Sequence: Synthetic polypeptide"
QVQLVQSGAEVKKPGSSVKVSCKASGYSFTTYYIHWVRQAPGQGLEWMGWFFPGSGNIKYNEKFKGRVTITADTSTSTAYMELSSLRSEDTAVYYCAGSIYSAGVLDYWGQGTTVTVSSGGGGSGGGGSGGGGSGGGGSDIQMTQSPSFLSASVGDRVTITCKASQNVGINVVWHQQKPGKAPKALIYSSSHRYSGVPSRFSGSGSGTEFTLTISSLQPEDFATYFCQQFKSYPLTFGQGTKLEIK

SEQ ID NO: 219 - protein, 119 aa, Artificial Sequence
  source: /note="Description of Artificial Sequence: Synthetic polypeptide"
QVQLVQSGAEVKKPGSSVKVSCKASGYSFTTYYIHWVRQAPGQGLEWMGWFFPGSGNIKYNEKFKGRVTITADTSTSTAYMELSSLRSEDTAVYYCAGSIYSAGVLDYWGQGTTVTVSS

SEQ ID NO: 220 - protein, 246 aa, Artificial Sequence
  source: /note="Description of Artificial Sequence: Synthetic polypeptide"
QVQLVQSGAEVKKPGSSVKVSCKASGYSFTLGYIHWVRQAPGQGLEWMGWFFPGSGNIKYNEKFKGRVTITADTSTSTAYMELSSLRSEDTAVYYCAGSYYSYDVLDYWGQGTTVTVSSGGGGSGGGGSGGGGSGGGGSDIQMTQSPSFLSASVGDRVTITCKASQNVGINVVWHQQKPGKAPKALIYSSSHRYSGVPSRFSGSGSGTEFTLTISSLQPEDFATYFCQQFKSYPLTFGQGTKLEIK

SEQ ID NO: 221 - protein, 119 aa, Artificial Sequence
  source: /note="Description of Artificial Sequence: Synthetic polypeptide"
QVQLVQSGAEVKKPGSSVKVSCKASGYSFTLGYIHWVRQAPGQGLEWMGWFFPGSGNIKYNEKFKGRVTITADTSTSTAYMELSSLRSEDTAVYYCAGSYYSYDVLDYWGQGTTVTVSS

SEQ ID NO: 222 - protein, 246 aa, Artificial Sequence
  source: /note="Description of Artificial Sequence: Synthetic polypeptide"
QVQLVQSGAEVKKPGSSVKVSCKASGYSFRLTYIHWVRQAPGQGLEWMGWFFPGSGNIKYNEKFKGRVTITADTSTSTAYMELSSLRSEDTAVYYCAGSYYSYDVLDYWGQGTTVTVSSGGGGSGGGGSGGGGSGGGGSDIQMTQSPSFLSASVGDRVTITCKASQNVGINVVWHQQKPGKAPKALIYSSSHRYSGVPSRFSGSGSGTEFTLTISSLQPEDFATYFCQQFKSYPLTFGQGTKLEIK

SEQ ID NO: 223 - protein, 119 aa, Artificial Sequence
  source: /note="Description of Artificial Sequence: Synthetic polypeptide"
QVQLVQSGAEVKKPGSSVKVSCKASGYSFRLTYIHWVRQAPGQGLEWMGWFFPGSGNIKYNEKFKGRVTITADTSTSTAYMELSSLRSEDTAVYYCAGSYYSYDVLDYWGQGTTVTVSS

SEQ ID NO: 224 - protein, 246 aa, Artificial Sequence
  source: /note="Description of Artificial Sequence: Synthetic polypeptide"
QVQLVQSGAEVKKPGSSVKVSCKASGYSFHNWYIHWVRQAPGQGLEWMGWFFPGSGNIKYNEKFKGRVTITADTSTSTAYMELSSLRSEDTAVYYCAGSYYSYDVLDYWGQGTTVTVSSGGGGSGGGGSGGGGSGGGGSDIQMTQSPSFLSASVGDRVTITCKASQNVGINVVWHQQKPGKAPKALIYSSSHRYSGVPSRFSGSGSGTEFTLTISSLQPEDFATYFCQQFKSYPLTFGQGTKLEIK

SEQ ID NO: 225 - protein, 119 aa, Artificial Sequence
  source: /note="Description of Artificial Sequence: Synthetic polypeptide"
QVQLVQSGAEVKKPGSSVKVSCKASGYSFHNWYIHWVRQAPGQGLEWMGWFFPGSGNIKYNEKFKGRVTITADTSTSTAYMELSSLRSEDTAVYYCAGSYYSYDVLDYWGQGTTVTVSS

SEQ ID NO: 226 - skipped

SEQ ID NO: 227 - protein, 133 aa, Artificial Sequence
  source: /note="Description of Artificial Sequence: Synthetic polypeptide"
APTSSSTKKTQLQLEHLLLDLQMILNGINNYKNPKLTRMLTFKFYMPKKATELKHLQCLEEELKPLEEVLNLAQSKNFHLRPRDLISNINVIVLELKGSETTFMCEYADETATIVEFLNRWITFAQSIISTLT

SEQ ID NO: 228 - protein, 133 aa, Artificial Sequence
  source: /note="Description of Artificial Sequence: Synthetic polypeptide"
APASSSTKKTQLQLEHLLLDLQMILNGINNYKNPKLTRMLTAKFAMPKKATELKHLQCLEEELKPLEEVLNGAQSKNFHLRPRDLISNINVIVLELKGSETTFMCEYADETATIVEFLNRWITFAQSIISTLT

SEQ ID NO: 229 - protein, 518 aa, Artificial Sequence
  source: /note="Description of Artificial Sequence: Synthetic polypeptide"
IWELKKDVYVVELDWYPDAPGEMVVLTCDTPEEDGITWTLDQSSEVLGSGKTLTIQVKEFGDAGQYTCHKGGEVLSHSLLLLHKKEDGIWSTDILKDQKEPKNKTFLRCEAKNYSGRFTCWWLTTISTDLTFSVKSSRGSSDPQGVTCGAATLSAERVRGDNKEYEYSVECQEDSACPAAEESLPIEVMVDAVHKLKYENYTSSFFIRDIIKPDPPKNLQLKPLKNSRQVEVSWEYPDTWSTPHSYFSLTFCVQVQGKSKREKKDRVFTDKTSATVICRKNASISVRAQDRYYSSSWSEWASVPCSGGGGSGGGGSGGGGSRNLPVATPDPGMFPCLHHSQNLLRAVSNMLQKARQTLEFYPCTSEEIDHEDITKDKTSTVEACLPLELTKNESCLNSRETSFITNGSCLASRKTSFMMALCLSSIYEDLKMYQVEFKTMNAKLLMDPKRQIFLDQNMLAVIDELMQALNFNSETVPQKSSLEEPDFYKTKIKLCILLHAFRIRAVTIDRVMSYLNAS

SEQ ID NO: 230 - protein, 107 aa, Artificial Sequence; identical to SEQ ID NO: 108
  source: /note="Description of Artificial Sequence: Synthetic polypeptide"
  VARIANT (30)..(30): /replace="Glu" or "Ala" or "Asp"
  VARIANT (31)..(31): /replace="Asp"
  VARIANT (32)..(32): /replace="Lys"
  VARIANT (36)..(36): /replace="His"
  VARIANT (56)..(56): /replace="Ser"
  SITE (1)..(107): /note="Variant residues given in the sequence have no preference with respect to those in the annotations for variant positions"

SEQ ID NO: 231 - protein, 119 aa, Artificial Sequence; identical to SEQ ID NO: 148
  source: /note="Description of Artificial Sequence: Synthetic polypeptide"
  VARIANT (27)..(27): /replace="Thr" or "Gly" or "Tyr"
  VARIANT (28)..(28): /replace="Thr" or "Ser"
  VARIANT (30)..(30): /replace="Arg" or "Asp" or "Lys" or "Thr"
  VARIANT (31)..(31): /replace="Asp" or "Lys" or "Thr" or "Asn"
  VARIANT (32)..(32): /replace="Phe" or "Thr" or "Ile" or "Tyr" or "Gly"
  VARIANT (50)..(50): /replace="Trp"
  VARIANT (51)..(51): /replace="Ile" or "Phe"
  VARIANT (52)..(52): /replace="Ser" or "Tyr"
  VARIANT (53)..(53): /replace="Pro"
  VARIANT (57)..(57): /replace="Ser"
  VARIANT (58)..(58): /replace="Val" or "Tyr" or "Ile"
  VARIANT (59)..(59): /replace="Arg"
  VARIANT (98)..(98): /replace="Val"
  VARIANT (100)..(100): /replace="Ile"
  VARIANT (103)..(103): /replace="Ala"
  VARIANT (104)..(104): /replace="Gly"
  SITE (1)..(119): /note="Variant residues given in the sequence have no preference with respect to those in the annotations for variant positions"

SEQ ID NO: 232 - protein, 107 aa, Artificial Sequence
  source: /note="Description of Artificial Sequence: Synthetic polypeptide"
DIQMTQTTSSLSASLGDRVTISCSASQGISNYLNWYQQKPDGTVKLLIYYTSSLHSGVPSRFSGSGSGTDYSLTISNLEPEDIATYYCQQYSKLPRTFGGGTKVEIK

SEQ ID NO: 233 - protein, 120 aa, Artificial Sequence
  source: /note="Description of Artificial Sequence: Synthetic polypeptide"
QVQLKESGPGLVAPSQSLSITCTVSGFSLTAYGVNWVRQPPGKGLEWLGMIWGDGNTDYNSALKSRLSISKDNSKSQVFLKMNSLQTDDTARYYCARDRVTATLYAMDYWGQGTSVTVSS

SEQ ID NO: 234-1099 - skipped (866 entries)

SEQ ID NO: 1100 - protein, 119 aa, Artificial Sequence; identical to SEQ ID NO: 9
  source: /note="Description of Artificial Sequence: Synthetic polypeptide"

SEQ ID NO: 1101 - protein, 106 aa, Artificial Sequence
  source: /note="Description of Artificial Sequence: Synthetic polypeptide"
QSVLTQPPSVSEAPRQRVTISCKASQNVGINVVWHQQLPGKAPKALIYSSSHRYSGVSDRFSGSGSGTSFSLAISGLQSEDEADYFCQQFKSYPLTFGTGTKVTVL

SEQ ID NO: 1102 - protein, 5 aa, Artificial Sequence
  source: /note="Description of Artificial Sequence: Synthetic peptide"
SAYMH

SEQ ID NO: 1103 - protein, 17 aa, Artificial Sequence
  source: /note="Description of Artificial Sequence: Synthetic peptide"
RIDPATGKTKYAPKFQA

SEQ ID NO: 1104 - protein, 10 aa, Artificial Sequence
  source: /note="Description of Artificial Sequence: Synthetic peptide"
SLNWDYGLDY

SEQ ID NO: 1105 - protein, 7 aa, Artificial Sequence
  source: /note="Description of Artificial Sequence: Synthetic peptide"
GFNIKSA

SEQ ID NO: 1106 - protein, 6 aa, Artificial Sequence
  source: /note="Description of Artificial Sequence: Synthetic peptide"
DPATGK

SEQ ID NO: 1107 - protein, 15 aa, Artificial Sequence
  source: /note="Description of Artificial Sequence: Synthetic peptide"
RASKSVSILGTHLIH

SEQ ID NO: 1108 - protein, 7 aa, Artificial Sequence
  source: /note="Description of Artificial Sequence: Synthetic peptide"
AASNLES

SEQ ID NO: 1109 - protein, 9 aa, Artificial Sequence
  source: /note="Description of Artificial Sequence: Synthetic peptide"
QQSIEDPWT

SEQ ID NO: 1110 - protein, 11 aa, Artificial Sequence
  source: /note="Description of Artificial Sequence: Synthetic peptide"
SKSVSILGTHL

SEQ ID NO: 1111 - protein, 111 aa, Artificial Sequence
  source: /note="Description of Artificial Sequence: Synthetic polypeptide"
DIVLTQSPASLAVSLGQRATISCRASKSVSILGTHLIHWYQQKPGQPPKLLIYAASNLESGVPARFSGSGSETVFTLNIHPVEEEDAATYFCQQSIEDPWTFGGGTKLGIK

SEQ ID NO: 1112 - protein, 119 aa, Artificial Sequence
  source: /note="Description of Artificial Sequence: Synthetic polypeptide"
EVQLQQSVADLVRPGASLKLSCTASGFNIKSAYMHWVIQRPDQGPECLGRIDPATGKTKYAPKFQAKATITADTSSNTAYLQLSSLTSEDTAIYYCTRSLNWDYGLDYWGQGTSVTVSS

SEQ ID NO: 1113 - protein, 119 aa, Artificial Sequence
  source: /note="Description of Artificial Sequence: Synthetic polypeptide"
QVQLVQSGAEVKKPGASVKVSCKASGFNIKSAYMHWVRQAPGQGLEWMGRIDPATGKTKYAPKFQARVTMTADTSTNTAYMELSSLRSEDTAVYYCARSLNWDYGLDYWGQGTLVTVSS

SEQ ID NO: 1114 - protein, 119 aa, Artificial Sequence
  source: /note="Description of Artificial Sequence: Synthetic polypeptide"
QVQLVQSGAEVKKPGASVKVSCKASGFNIKSAYMHWVRQAPGQEPGCMGRIDPATGKTKYAPKFQARVTMTADTSINTAYTELSSLRSEDTATYYCARSLNWDYGLDYWGQGTLVTVSS

SEQ ID NO: 1115 - protein, 119 aa, Artificial Sequence
  source: /note="Description of Artificial Sequence: Synthetic polypeptide"
QVQLVQSGAEVKKPGSSVKVSCKASGFNIKSAYMHWVRQAPGQGLEWMGRIDPATGKTKYAPKFQARVTITADTSTNTAYMELSSLRSEDTAVYYCARSLNWDYGLDYWGQGTLVTVSS

SEQ ID NO: 1116 - protein, 119 aa, Artificial Sequence
  source: /note="Description of Artificial Sequence: Synthetic polypeptide"
QVQLVQSGAEVKKPGASVKVSCKASGFNIKSAYMHWVRQAPGQRLEWMGRIDPATGKTKYAPKFQARVTITADTSANTAYMELSSLRSEDTAVYYCARSLNWDYGLDYWGQGTLVTVSS

SEQ ID NO: 1117 - protein, 109 aa, Artificial Sequence
  source: /note="Description of Artificial Sequence: Synthetic polypeptide"
EIVLTQSPATLSLSPGERATLSCRASKSVSILGTHLIHWYQQKPGQAPRLLIYAASNLESGIPARFSGSGSETDFTLTISSLEPEDFAVYFCQQSIEDPFGGGTKVEIK

SEQ ID NO: 1118 - protein, 109 aa, Artificial Sequence
  source: /note="Description of Artificial Sequence: Synthetic polypeptide"
EIVLTQSPATLSLSPGERATLSCRASKSVSILGTHLIHWYQQKPGLAPRLLIYAASNLESGIPDRFSGSGSETDFTLTISRLEPEDFAVYFCQQSIEDPFGGGTKVEIK

SEQ ID NO: 1119 - protein, 109 aa, Artificial Sequence
  source: /note="Description of Artificial Sequence: Synthetic polypeptide"
EIVLTQSPGTLSLSPGERATLSCRASKSVSILGTHLIHWYQQKPGQAPRLLIYAASNLESGIPDRFSGSGSETDFTLTISRLEPEDFAVYFCQQSIEDPFGGGTKVEIK

SEQ ID NO: 1120 - protein, 5 aa, Artificial Sequence
  source: /note="Description of Artificial Sequence: Synthetic peptide"
DTYMY

SEQ ID NO: 1121 - protein, 17 aa, Artificial Sequence
  source: /note="Description of Artificial Sequence: Synthetic peptide"
RIDPANGNTKYDPKFQD

SEQ ID NO: 1122 - protein, 9 aa, Artificial Sequence
  source: /note="Description of Artificial Sequence: Synthetic peptide"
GSYYYAMDY

SEQ ID NO: 1123 - protein, 7 aa, Artificial Sequence
  source: /note="Description of Artificial Sequence: Synthetic peptide"
GFKTEDT

SEQ ID NO: 1124 - protein, 6 aa, Artificial Sequence
  source: /note="Description of Artificial Sequence: Synthetic peptide"
DPANGN

SEQ ID NO: 1125 - protein, 10 aa, Artificial Sequence
  source: /note="Description of Artificial Sequence: Synthetic peptide"
GFKTEDTYMY

SEQ ID NO: 1126 - protein, 15 aa, Artificial Sequence
  source: /note="Description of Artificial Sequence: Synthetic peptide"
RASESVDSYGNSFMH

SEQ ID NO: 1127 - protein, 7 aa, Artificial Sequence
  source: /note="Description of Artificial Sequence: Synthetic peptide"
RASNLES

SEQ ID NO: 1128 - protein, 9 aa, Artificial Sequence
  source: /note="Description of Artificial Sequence: Synthetic peptide"
QQSNEDPYT

SEQ ID NO: 1129 - protein, 111 aa, Artificial Sequence
  source: /note="Description of Artificial Sequence: Synthetic polypeptide"
DIVLTQSPASLAVSLGQRATISCRASESVDSYGNSFMHWYQQKPGQPPKLLIYRASNLESGIPARFSGSGSRTDFTLTINPVEADDVATYYCQQSNEDPYTFGGGTKLEIK

SEQ ID NO: 1130 - protein, 118 aa, Artificial Sequence
  source: /note="Description of Artificial Sequence: Synthetic polypeptide"
EVQLQQSGAELVKPGASVKLSCTASGFKTEDTYMYWVKQRPEQGLEWIGRIDPANGNTKYDPKFQDKATITADSSSNTAYLQLSSLPSEDTAVYYCARGSYYYAMDYWGQGTSVTVSS

SEQ ID NO: 1131 - protein, 118 aa, Artificial Sequence
  source: /note="Description of Artificial Sequence: Synthetic polypeptide"
QVQLVQSGAEVKKPGSSVKVSCKASGFKTEDTYMYWVRQAPGQGLEWIGRIDPANGNTKYDPKFQDRATITADSSTNTAYMELSSLRSEDTAVYYCARGSYYYAMDYWGQGTLVTVSS

SEQ ID NO: 1132 - protein, 118 aa, Artificial Sequence
  source: /note="Description of Artificial Sequence: Synthetic polypeptide"
QVQLVQSGAEVKKPGASVKVSCKASGFKTEDTYMYWVRQAPGQRLEWIGRIDPANGNTKYDPKFQDRATITADSSANTAYMELSSLRSEDTAVYYCARGSYYYAMDYWGQGTLVTVSS

SEQ ID NO: 1133 - protein, 118 aa, Artificial Sequence
  source: /note="Description of Artificial Sequence: Synthetic polypeptide"
EVQLVESGGGLVQPGGSLKLSCAASGFKTEDTYMYWVRQASGKGLEWIGRIDPANGNTKYDPKFQDRATISADSSKNTAYLQMNSLKTEDTAVYYCARGSYYYAMDYWGQGTLVTVSS

SEQ ID NO: 1134 - protein, 118 aa, Artificial Sequence
  source: /note="Description of Artificial Sequence: Synthetic polypeptide"
EVQLVQSGAEVKKPGESLRISCKASGFKTEDTYMYWVRQMPGKGLEWIGRIDPANGNTKYDPKFQDQATISADSSINTAYLQWSSLKASDTAMYYCARGSYYYAMDYWGQGTLVTVSS

SEQ ID NO: 1135 - protein, 118 aa, Artificial Sequence
  source: /note="Description of Artificial Sequence: Synthetic polypeptide"
QVQLVQSGSELKKPGASVKVSCKASGFKTEDTYMYWVRQAPGQGLEWIGRIDPANGNTKYDPKFQDRAVISADSSVNTAYLQISSLKAEDTAVYYCARGSYYYAMDYWGQGTLVTVSS

SEQ ID NO: 1136 - protein, 111 aa, Artificial Sequence
  source: /note="Description of Artificial Sequence: Synthetic polypeptide"
DIVLTQSPDSLAVSLGERATINCRASESVDSYGNSFMHWYQQKPGQPPKLLIYRASNLESGVPDRFSGSGSRTDFTLTISSLQAEDVAVYYCQQSNEDPYTFGQGTKLEIK

SEQ ID NO: 1137 - protein, 111 aa, Artificial Sequence
  source: /note="Description of Artificial Sequence: Synthetic polypeptide"
EIVLTQSPATLSLSPGERATLSCRASESVDSYGNSFMHWYQQKPGQAPKLLIYRASNLESGIPARFSGSGSRTDFTLTISRLEPEDFAVYYCQQSNEDPYTFGQGTKLEIK

SEQ ID NO: 1138 - protein, 111 aa, Artificial Sequence
  source: /note="Description of Artificial Sequence: Synthetic polypeptide"
DIQLTQSPSSLSASVGDRVTITCRASESVDSYGNSFMHWYQQKPGQAPKLLIYRASNLESGVPSRFSGSGSRTDFTLTISSLQPEDVATYYCQQSNEDPYTFGQGTKLEIK

SEQ ID NO: 1139 - protein, 111 aa, Artificial Sequence
  source: /note="Description of Artificial Sequence: Synthetic polypeptide"
AIQLTQSPSSLSASVGDRVTITCRASESVDSYGNSFMHWYQQKPGKAPKLLIYRASNLESGVPSRFSGSGSRTDFTLTISSLQPEDFATYYCQQSNEDPYTFGQGTKLEIK

SEQ ID NO: 1140 - protein, 111 aa, Artificial Sequence
  source: /note="Description of Artificial Sequence: Synthetic polypeptide"
EIVLTQSPDFQSVTPKEKVTITCRASESVDSYGNSFMHWYQQKPDQSPKLLIYRASNLESGVPSRFSGSGSRTDFTLTINSLEAEDAATYYCQQSNEDPYTFGQGTKLEIK

SEQ ID NO: 1141 - protein, 5 aa, Artificial Sequence
  source: /note="Description of Artificial Sequence: Synthetic peptide"
SYAMS

SEQ ID NO: 1142 - protein, 17 aa, Artificial Sequence
  source: /note="Description of Artificial Sequence: Synthetic peptide"
HISNGGDYIYYADTVKG

SEQ ID NO: 1143 - protein, 12 aa, Artificial Sequence
  source: /note="Description of Artificial Sequence: Synthetic peptide"
PSYYSDPWFFDV

SEQ ID NO: 1144 - protein, 7 aa, Artificial Sequence
  source: /note="Description of Artificial Sequence: Synthetic peptide"
GFTFRSY

SEQ ID NO: 1145 - protein, 6 aa, Artificial Sequence
  source: /note="Description of Artificial Sequence: Synthetic peptide"
SNGGDY

SEQ ID NO: 1146 - protein, 10 aa, Artificial Sequence
  source: /note="Description of Artificial Sequence: Synthetic peptide"
GFTFRSYAMS

SEQ ID NO: 1147 - protein, 10 aa, Artificial Sequence
  source: /note="Description of Artificial Sequence: Synthetic peptide"
SAGSSVSFMH

SEQ ID NO: 1148 - protein, 7 aa, Artificial Sequence
  source: /note="Description of Artificial Sequence: Synthetic peptide"
DTSKLAS

SEQ ID NO: 1149 - protein, 9 aa, Artificial Sequence
  source: /note="Description of Artificial Sequence: Synthetic peptide"
LQGSGFPLT

SEQ ID NO: 1150 - protein, 6 aa, Artificial Sequence
  source: /note="Description of Artificial Sequence: Synthetic peptide"
GSSVSF

SEQ ID NO: 1151 - protein, 106 aa, Artificial Sequence
  source: /note="Description of Artificial Sequence: Synthetic polypeptide"
ENVLTQSPAIMSASPGEKVTMTCSAGSSVSFMHWYQQKSSTSPKLWIYDTSKLASGVPGRFSGSGSGNSFSLTISSMEAEDVAIYYCLQGSGFPLTFGSGTKLEIK

SEQ ID NO: 1152 - protein, 121 aa, Artificial Sequence
  source: /note="Description of Artificial Sequence: Synthetic polypeptide"
DVKLVESGEGLVKPGGSLKLSCAASGFTFRSYAMSWVRQTPEKRLEWVAHISNGGDYIYYADTVKGRFTISRDNARNTLYLQMSSLKSEDTAMYYCTRPSYYSDPWFFDVWGTGTTVTVSS

SEQ ID NO: 1153 - protein, 121 aa, Artificial Sequence
  source: /note="Description of Artificial Sequence: Synthetic polypeptide"
EVQLVESGGGLVQPGGSLRLSCAASGFTFRSYAMSWVRQAPGKGLEWVAHISNGGDYIYYADTVKGRFTISRDNAKNSLYLQMNSLRAEDTAVYYCTRPSYYSDPWFFDVWGQGTTVTVSS

SEQ ID NO: 1154 - protein, 121 aa, Artificial Sequence
  source: /note="Description of Artificial Sequence: Synthetic polypeptide"
QVQLVESGGGVVQPGRSLRLSCAASGFTFRSYAMSWVRQAPGKGLEWVAHISNGGDYIYYADTVKGRFTISRDNSKNTLYLQMSSLRAEDTAVYYCTRPSYYSDPWFFDVWGQGTTVTVSS

SEQ ID NO: 1155 - protein, 121 aa, Artificial Sequence
  source: /note="Description of Artificial Sequence: Synthetic polypeptide"
EVQLVESGGGLVQPGGSLRLSCAASGFTFRSYAMSWVRQAPGKGLEWVAHISNGGDYIYYADTVKGRFTISRDNSKNTLYLQMNSLRAEDTAVYYCTRPSYYSDPWFFDVWGQGTTVTVSS

SEQ ID NO: 1156 - protein, 121 aa, Artificial Sequence
  source: /note="Description of Artificial Sequence: Synthetic polypeptide"
QVQLVQSGSELKKPGASVKVSCKASGFTFRSYAMSWVRQAPGQGLEWVAHISNGGDYIYYADTVKGRFVISRDNSVNTLYLQISSLKAEDTAVYYCTRPSYYSDPWFFDVWGQGTTVTVSS

SEQ ID NO: 1157 - protein, 121 aa, Artificial Sequence
  source: /note="Description of Artificial Sequence: Synthetic polypeptide"
QVQLVQSGAEVKKPGASVKVSCKASGFTFRSYAMSWVRQAPGQRLEWVAHISNGGDYIYYADTVKGRFTITRDNSANTLYMELSSLRSEDTAVYYCTRPSYYSDPWFFDVWGQGTTVTVSS

SEQ ID NO: 1158 - protein, 106 aa, Artificial Sequence
  source: /note="Description of Artificial Sequence: Synthetic polypeptide"
ENVLTQSPATLSLSPGERATLSCSAGSSVSFMHWYQQKPGQAPKLLIYDTSKLASGIPARFSGSGSGNDFTLTISSLEPEDFAVYYCLQGSGFPLTFGQGTKLEIK

SEQ ID NO: 1159 - protein, 106 aa, Artificial Sequence
  source: /note="Description of Artificial Sequence: Synthetic polypeptide"
ENVLTQSPDFQSVTPKEKVTITCSAGSSVSFMHWYQQKPDQSPKLLIYDTSKLASGVPSRFSGSGSGNDFTLTINSLEAEDAATYYCLQGSGFPLTFGQGTKLEIK

SEQ ID NO: 1160 - protein, 106 aa, Artificial Sequence
  source: /note="Description of Artificial Sequence: Synthetic polypeptide"
DNQLTQSPSSLSASVGDRVTITCSAGSSVSFMHWYQQKPGKVPKLLIYDTSKLASGVPSRFSGSGSGNDFTLTISSLQPEDVATYYCLQGSGFPLTFGQGTKLEIK

SEQ ID NO: 1161 - protein, 106 aa, Artificial Sequence
  source: /note="Description of Artificial Sequence: Synthetic polypeptide"
ANQLTQSPSSLSASVGDRVTITCSAGSSVSFMHWYQQKPGKAPKLLIYDTSKLASGVPSRFSGSGSGNDFTLTISSLQPEDFATYYCLQGSGFPLTFGQGTKLEIK

SEQ ID NO: 1162 - protein, 106 aa, Artificial Sequence
  source: /note="Description of Artificial Sequence: Synthetic polypeptide"
DNVLTQSPDSLAVSLGERATINCSAGSSVSFMHWYQQKPGQPPKLLIYDTSKLASGVPDRFSGSGSGNDFTLTISSLQAEDVAVYYCLQGSGFPLTFGQGTKLEIK

SEQ ID NO: 1163 - protein, 5 aa, Artificial Sequence
  source: /note="Description of Artificial Sequence: Synthetic peptide"
DYNIH

SEQ ID NO: 1164 - protein, 17 aa, Artificial Sequence
  source: /note="Description of Artificial Sequence: Synthetic peptide"
YINPYNGRTGYNQKFKA

SEQ ID NO: 1165 - protein, 9 aa, Artificial Sequence
  source: /note="Description of Artificial Sequence: Synthetic peptide"
WDGSSYFDY

SEQ ID NO: 1166 - protein, 10 aa, Artificial Sequence
  source: /note="Description of Artificial Sequence: Synthetic peptide"
GYTFTDYNIH

SEQ ID NO: 1167 - protein, 6 aa, Artificial Sequence
  source: /note="Description of Artificial Sequence: Synthetic peptide"
NPYNGR

SEQ ID NO: 1168 - protein, 10 aa, Artificial Sequence
  source: /note="Description of Artificial Sequence: Synthetic peptide"
SASSSVSYMH

SEQ ID NO: 1169 - protein, 7 aa, Artificial Sequence
  source: /note="Description of Artificial Sequence: Synthetic peptide"
EISKLAS

SEQ ID NO: 1170 - protein, 9 aa, Artificial Sequence
  source: /note="Description of Artificial Sequence: Synthetic peptide"
QQWNYPLLT

SEQ ID NO: 1171 - protein, 106 aa, Artificial Sequence
  source: /note="Description of Artificial Sequence: Synthetic polypeptide"
EIVLTQSPAITAASLGQKVTITCSASSSVSYMHWYQQKSGTSPKPWIYEISKLASGVPARFSGSGSGTSYSLTISSMEAEDAAIYYCQQWNYPLLTFGAGTKLELK

SEQ ID NO: 1172 - protein, 118 aa, Artificial Sequence
  source: /note="Description of Artificial Sequence: Synthetic polypeptide"
EVQLQQSGPVLVKPGASVRMSCKASGYTFTDYNIHWVKQSHGRSLEWVGYINPYNGRTGYNQKFKAKATLTVDKSSSTAYMDLRSLTSEDSAVYYCARWDGSSYFDYWGQGTTLTVSS

SEQ ID NO: 1173 - protein, 118 aa, Artificial Sequence
  source: /note="Description of Artificial Sequence: Synthetic polypeptide"
QVQLVQSGAEVKKPGSSVKVSCKASGYTFTDYNIHWVRQAPGQGLEWVGYINPYNGRTGYNQKFKARATLTVDKSTSTAYMELSSLRSEDTAVYYCARWDGSSYFDYWGQGTTVTVSS

SEQ ID NO: 1174 - protein, 118 aa, Artificial Sequence
  source: /note="Description of Artificial Sequence: Synthetic polypeptide"
QVQLVQSGAEVKKPGASVKVSCKASGYTFTDYNIHWVRQAPGQGLEWVGYINPYNGRTGYNQKFKARATLTVDKSTSTAYMELRSLRSDDMAVYYCARWDGSSYFDYWGQGTTVTVSS

SEQ ID NO: 1175 - protein, 118 aa, Artificial Sequence
  source: /note="Description of Artificial Sequence: Synthetic polypeptide"
QVQLVQSGAEVKKPGASVKVSCKASGYTFTDYNIHWVRQATGQGLEWVGYINPYNGRTGYNQKFKARATLTVNKSISTAYMELSSLRSEDTAVYYCARWDGSSYFDYWGQGTTVTVSS

SEQ ID NO: 1176 - protein, 118 aa, Artificial Sequence
  source: /note="Description of Artificial Sequence: Synthetic polypeptide"
EVQLVESGGGLVQPGRSLRLSCTASGYTFTDYNIHWVRQAPGKGLEWVGYINPYNGRTGYNQKFKARATLSVDKSKSIAYLQMNSLKTEDTAVYYCARWDGSSYFDYWGQGTTVTVSS

SEQ ID NO: 1177 - protein, 118 aa, Artificial Sequence
  source: /note="Description of Artificial Sequence: Synthetic polypeptide"
QVQLVQSGSELKKPGASVKVSCKASGYTFTDYNIHWVRQAPGQGLEWVGYINPYNGRTGYNQKFKARAVLSVDKSVSTAYLQISSLKAEDTAVYYCARWDGSSYFDYWGQGTTVTVSS

SEQ ID NO: 1178 - protein, 106 aa, Artificial Sequence
  source: /note="Description of Artificial Sequence: Synthetic polypeptide"
EIVLTQSPATLSLSPGERATLSCSASSSVSYMHWYQQKPGQAPKLLIYEISKLASGIPARFSGSGSGTDYTLTISSLEPEDFAVYYCQQWNYPLLTFGQGTKLEIK

SEQ ID NO: 1179 - protein, 106 aa, Artificial Sequence
  source: /note="Description of Artificial Sequence: Synthetic polypeptide"
EIVLTQSPATLSLSPGERATLSCSASSSVSYMHWYQQKPGQAPKLLIYEISKLASGIPARFSGSGSGTDYTLTISRLEPEDFAVYYCQQWNYPLLTFGQGTKLEIK

SEQ ID NO: 1180 - protein, 106 aa, Artificial Sequence
  source: /note="Description of Artificial Sequence: Synthetic polypeptide"
EIVLTQSPDFQSVTPKEKVTITCSASSSVSYMHWYQQKPDQSPKLLIYEISKLASGVPSRFSGSGSGTDYTLTINSLEAEDAATYYCQQWNYPLLTFGQGTKLEIK

SEQ ID NO: 1181 - protein, 106 aa, Artificial Sequence
  source: /note="Description of Artificial Sequence: Synthetic polypeptide"
DIQLTQSPSFLSASVGDRVTITCSASSSVSYMHWYQQKPGKAPKLLIYEISKLASGVPSRFSGSGSGTEYTLTISSLQPEDFATYYCQQWNYPLLTFGQGTKLEIK

SEQ ID NO: 1182 - protein, 106 aa, Artificial Sequence
  source: /note="Description of Artificial Sequence: Synthetic polypeptide"
AIQLTQSPSSLSASVGDRVTITCSASSSVSYMHWYQQKPGKAPKLLIYEISKLASGVPSRFSGSGSGTDYTLTISSLQPEDFATYYCQQWNYPLLTFGQGTKLEIK

SEQ ID NO: 1183 - protein, 106 aa, Artificial Sequence
  source: /note="Description of Artificial Sequence: Synthetic polypeptide"
AIRLTQSPFSLSASVGDRVTITCSASSSVSYMHWYQQKPAKAPKLFIYEISKLASGVPSRFSGSGSGTDYTLTISSLQPEDFATYYCQQWNYPLLTFGQGTKLEIK

SEQ ID NO: 1184 - protein, 106 aa, Artificial Sequence
  source: /note="Description of Artificial Sequence: Synthetic polypeptide"
DIVLTQSPDSLAVSLGERATINCSASSSVSYMHWYQQKPGQPPKLLIYEISKLASGVPDRFSGSGSGTDYTLTISSLQAEDVAVYYCQQWNYPLLTFGQGTKLEIK

SEQ ID NO: 1185 - protein, 5 aa, Artificial Sequence
  source: /note="Description of Artificial Sequence: Synthetic peptide"
GSWMN

SEQ ID NO: 1186 - protein, 17 aa, Artificial Sequence
  source: /note="Description of Artificial Sequence: Synthetic peptide"
RIYPGDGDTDYSGKFKG

SEQ ID NO: 1187 - protein, 12 aa, Artificial Sequence
  source: /note="Description of Artificial Sequence: Synthetic peptide"
SGYFNYVPVFDY

SEQ ID NO: 1188 - protein, 7 aa, Artificial Sequence
  source: /note="Description of Artificial Sequence: Synthetic peptide"
GYTFSGS

SEQ ID NO: 1189 - protein, 6 aa, Artificial Sequence
  source: /note="Description of Artificial Sequence: Synthetic peptide"
YPGDGD

SEQ ID NO: 1190 - protein, 10 aa, Artificial Sequence
  source: /note="Description of Artificial Sequence: Synthetic peptide"
GYTFSGSWMN

SEQ ID NO: 1191 - protein, 10 aa, Artificial Sequence
  source: /note="Description of Artificial Sequence: Synthetic peptide"
SANSTVGYIH

SEQ ID NO: 1192 - protein, 7 aa, Artificial Sequence
  source: /note="Description of Artificial Sequence: Synthetic peptide"
TTSNLAS

SEQ ID NO: 1193 - protein, 8 aa, Artificial Sequence
  source: /note="Description of Artificial Sequence: Synthetic peptide"
HQWSFYPT

SEQ ID NO: 1194 - protein, 6 aa, Artificial Sequence
  source: /note="Description of Artificial Sequence: Synthetic peptide"
NSTVGY

SEQ ID NO: 1195 - protein, 105 aa, Artificial Sequence
  source: /note="Description of Artificial Sequence: Synthetic polypeptide"
QIVLTQSPAIMSASLGEEIALTCSANSTVGYIHWYQQKSGTSPKLLIYTTSNLASGVPSRFSGSGSGTFYSLTISSVEAEDAADYFCHQWSFYPTFGGGTKLEIK

SEQ ID NO: 1196 - protein, 121 aa, Artificial Sequence
  source: /note="Description of Artificial Sequence: Synthetic polypeptide"
QIQLQQSGPEVVKPGASVQISCKASGYTFSGSWMNWVKQRPGKGLEWIGRIYPGDGDTDYSGKFKGRATLTADKSSSTAYMRLSSLTSEDSAVYFCARSGYFNYVPVFDYWGQGTTLSVSS

SEQ ID NO: 1197 - protein, 121 aa, Artificial Sequence
  source: /note="Description of Artificial Sequence: Synthetic polypeptide"
QIQLVQSGAEVKKPGASVKVSCKASGYTFSGSWMNWVRQAPGQGLEWIGRIYPGDGDTDYSGKFKGRATLTADKSTSTAYMELSSLRSEDTAVYYCARSGYFNYVPVFDYWGQGTTVTVSS

SEQ ID NO: 1198 - protein, 121 aa, Artificial Sequence
  source: /note="Description of Artificial Sequence: Synthetic polypeptide"
QIQLVQSGAEVKKPGSSVKVSCKASGYTFSGSWMNWVRQAPGQGLEWIGRIYPGDGDTDYSGKFKGRATLTADKSTSTAYMELSSLRSEDTAVYYCARSGYFNYVPVFDYWGQGTTVTVSS

SEQ ID NO: 1199 - protein, 121 aa, Artificial Sequence
  source: /note="Description of Artificial Sequence: Synthetic polypeptide"
EIQLVQSGAEVKKPGESLKISCKASGYTFSGSWMNWVRQMPGKGLEWIGRIYPGDGDTDYSGKFKGQATLSADKSISTAYLQWSSLKASDTAMYYCARSGYFNYVPVFDYWGQGTTVTVSS

SEQ ID NO: 1200 - protein, 121 aa, Artificial Sequence
  source: /note="Description of Artificial Sequence: Synthetic polypeptide"
QIQLVQSGSELKKPGASVKVSCKASGYTFSGSWMNWVRQAPGQGLEWIGRIYPGDGDTDYSGKFKGRAVLSADKSVSTAYLQISSLKAEDTAVYYCARSGYFNYVPVFDYWGQGTTVTVSS

SEQ ID NO: 1201 - protein, 121 aa, Artificial Sequence
  source: /note="Description of Artificial Sequence: Synthetic polypeptide"
QIQLVQSGSELKKPGASVKVSCKASGYTFSGSWMNWVRQAPGQGLEWIGRIYPGDGDTDYSGKFKGRAVLSADKSVSMAYLQISSLKAEDTAVYYCARSGYFNYVPVFDYWGQGTTVTVSS

SEQ ID NO: 1202 - protein, 121 aa, Artificial Sequence
  source: /note="Description of Artificial Sequence: Synthetic polypeptide"
EIQLVESGGGLVQPGRSLRLSCTASGYTFSGSWMNWVRQAPGKGLEWIGRIYPGDGDTDYSGKFKGRATLSADKSKSIAYLQMNSLKTEDTAVYYCARSGYFNYVPVFDYWGQGTTVTVSS

SEQ ID NO: 1203 - protein, 105 aa, Artificial Sequence
  source: /note="Description of Artificial Sequence: Synthetic polypeptide"
EIVLTQSPATLSLSPGERATLSCSANSTVGYIHWYQQKPGQAPKLLIYTTSNLASGIPARFSGSGSGTDYTLTISSLEPEDFAVYFCHQWSFYPTFGQGTKLEIK

SEQ ID NO: 1204 - protein, 105 aa, Artificial Sequence
  source: /note="Description of Artificial Sequence: Synthetic polypeptide"
DIQLTQSPSFLSASVGDRVTITCSANSTVGYIHWYQQKPGKAPKLLIYTTSNLASGVPSRFSGSGSGTEYTLTISSLQPEDFATYFCHQWSFYPTFGQGTKLEIK

SEQ ID NO: 1205 - protein, 105 aa, Artificial Sequence
  source: /note="Description of Artificial Sequence: Synthetic polypeptide"
EIVLTQSPATLSLSPGERATLSCSANSTVGYIHWYQQKPGQAPKLLIYTTSNLASGIPARFSGSGPGTDYTLTISSLEPEDFAVYFCHQWSFYPTFGQGTKLEIK

SEQ ID NO: 1206 - protein, 105 aa, Artificial Sequence
  source: /note="Description of Artificial Sequence: Synthetic polypeptide"
DIVLTQSPDSLAVSLGERATINCSANSTVGYIHWYQQKPGQPPKLLIYTTSNLASGVPDRFSGSGSGTDYTLTISSLQAEDVAVYFCHQWSFYPTFGQGTKLEIK

SEQ ID NO: 1207 - protein, 105 aa, Artificial Sequence
  source: /note="Description of Artificial Sequence: Synthetic polypeptide"
EIVLTQSPDFQSVTPKEKVTITCSANSTVGYIHWYQQKPDQSPKLLIYTTSNLASGVPSRFSGSGSGTDYTLTINSLEAEDAATYFCHQWSFYPTFGQGTKLEIK

SEQ ID NO: 1208 - protein, 5 aa, Artificial Sequence
  source: /note="Description of Artificial Sequence: Synthetic peptide"
DYYMY

SEQ ID NO: 1209 - protein, 17 aa, Artificial Sequence
  source: /note="Description of Artificial Sequence: Synthetic peptide"
TISGGGSYTYSPDSVKG

SEQ ID NO: 1210 - protein, 14 aa, Artificial Sequence
  source: /note="Description of Artificial Sequence: Synthetic peptide"
ERDIYYGNFNAMVY

SEQ ID NO: 1211 - protein, 7 aa, Artificial Sequence
  source: /note="Description of Artificial Sequence: Synthetic peptide"
GFTFSDY

SEQ ID NO: 1212 - protein, 6 aa, Artificial Sequence
  source: /note="Description of Artificial Sequence: Synthetic peptide"
SGGGSY

SEQ ID NO: 1213 - protein, 10 aa, Artificial Sequence
  source: /note="Description of Artificial Sequence: Synthetic peptide"
GFTFSDYYMY

SEQ ID NO: 1214 - protein, 15 aa, Artificial Sequence
  source: /note="Description of Artificial Sequence: Synthetic peptide"
RASKSVSTSGYSYMH

SEQ ID NO: 1215 - protein, 7 aa, Artificial Sequence
  source: /note="Description of Artificial Sequence: Synthetic peptide"
LASNLES

SEQ ID NO: 1216 - protein, 9 aa, Artificial Sequence
  source: /note="Description of Artificial Sequence: Synthetic peptide"
QHSRDLPWT

SEQ ID NO: 1217 - protein, 11 aa, Artificial Sequence
  source: /note="Description of Artificial Sequence: Synthetic peptide"
SKSVSTSGYSY

SEQ ID NO: 1218 - protein, 111 aa, Artificial Sequence
  source: /note="Description of Artificial Sequence: Synthetic polypeptide"
DIVLTQSPVSLTVSLGQRATISCRASKSVSTSGYSYMHWYQQKPGQPPKLLIYLASNLESGVPARFSGSGSGTDFTLNIHPVEEEDAATYYCQHSRDLPWTFGGGTKLEIK

SEQ ID NO: 1219 - protein, 123 aa, Artificial Sequence
  source: /note="Description of Artificial Sequence: Synthetic polypeptide"
EVQLVESGGGLVKPGGSLKLSCAASGFTFSDYYMYWVRQTPEKRLEWVATISGGGSYTYSPDSVKGRFTISRDNAKNNLYLQMSSLRSEDTAMYFCARERDIYYGNFNAMVYWGRGTSVTVSS

SEQ ID NO: 1220 - protein, 123 aa, Artificial Sequence
  source: /note="Description of Artificial Sequence: Synthetic polypeptide"
EVQLLESGGGLVQPGGSLRLSCAASGFTFSDYYMYWVRQAPGKGLEWVATISGGGSYTYSPDSVKGRFTISRDNSKNTLYLQMNSLRAEDTAVYYCARERDIYYGNFNAMVYWGRGTLVTVSS

SEQ ID NO: 1221 - protein, 123 aa, Artificial Sequence
  source: /note="Description of Artificial Sequence: Synthetic polypeptide"
EVQLVESGGGLVQPGGSLRLSCAASGFTFSDYYMYWVRQAPGKGLEWVATISGGGSYTYSPDSVKGRFTISRDNAKNSLYLQMNSLRAEDTAVYYCARERDIYYGNFNAMVYWGRGTLVTVSS

SEQ ID NO: 1222 - protein, 123 aa, Artificial Sequence
  source: /note="Description of Artificial Sequence: Synthetic polypeptide"
QVQLVESGGGVVQPGRSLRLSCAASGFTFSDYYMYWVRQAPGKGLEWVATISGGGSYTYSPDSVKGRFTISRDNSKNTLYLQMNSLRAEDTAVYYCARERDIYYGNFNAMVYWGRGTLVTVSS

SEQ ID NO: 1223 - protein, 123 aa, Artificial Sequence
  source: /note="Description of Artificial Sequence: Synthetic polypeptide"
QVQLVESGGGLVKPGGSLRLSCAASGFTFSDYYMYWIRQAPGKGLEWVATISGGGSYTYSPDSVKGRFTISRDNAKNSLYLQMNSLRAEDTAVYYCARERDIYYGNFNAMVYWGRGTLVTVSS

SEQ ID NO: 1224 - protein, 111 aa, Artificial Sequence
  source: /note="Description of Artificial Sequence: Synthetic polypeptide"
EIVLTQSPGTLSLSPGERATLSCRASKSVSTSGYSYMHWYQQKPGQAPRLLIYLASNLESGIPDRFSGSGSGTDFTLTISRLEPEDFAVYYCQHSRDLPWTFGGGTKVEIK

SEQ ID NO: 1225 - protein, 111 aa, Artificial Sequence
  source: /note="Description of Artificial Sequence: Synthetic polypeptide"
EIVLTQSPATLSLSPGERATLSCRASKSVSTSGYSYMHWYQQKPGQAPRLLIYLASNLESGIPARFSGSGSGTDFTLTISSLEPEDFAVYYCQHSRDLPWTFGGGTKVEIK

SEQ ID NO: 1226 - protein, 111 aa, Artificial Sequence
  source: /note="Description of Artificial Sequence: Synthetic polypeptide"
DIQLTQSPSTLSASVGDRVTITCRASKSVSTSGYSYMHWYQQKPGKAPKLLIYLASNLESGVPSRFSGSGSGTEFTLTISSLQPDDFATYYCQHSRDLPWTFGGGTKVEIK

SEQ ID NO: 1227 - protein, 111 aa, Artificial Sequence
  source: /note="Description of Artificial Sequence: Synthetic polypeptide"
AIQLTQSPSSLSASVGDRVTITCRASKSVSTSGYSYMHWYQQKPGKAPKLLIYLASNLESGVPSRFSGSGSGTDFTLTISSLQPEDFATYYCQHSRDLPWTFGGGTKVEIK

SEQ ID NO: 1228 - skipped

SEQ ID NO: 1229 - protein, 5 aa, Artificial Sequence
  source: /note="Description of Artificial Sequence: Synthetic peptide"
GYFWN

SEQ ID NO: 1230 - protein, 16 aa, Artificial Sequence
  source: /note="Description of Artificial Sequence: Synthetic peptide"
YISYDGSNNYNPSLKN

SEQ ID NO: 1231 - protein, 11 aa, Artificial Sequence
  source: /note="Description of Artificial Sequence: Synthetic peptide"
PSPGTGYAVDY

SEQ ID NO: 1232 - protein, 8 aa, Artificial Sequence
  source: /note="Description of Artificial Sequence: Synthetic peptide"
GYSITSGY

SEQ ID NO: 1233 - protein, 6 aa, Artificial Sequence
  source: /note="Description of Artificial Sequence: Synthetic peptide"
SYDGSN

SEQ ID NO: 1234 - protein, 11 aa, Artificial Sequence
  source: /note="Description of Artificial Sequence: Synthetic peptide"
GYSITSGYFWN

SEQ ID NO: 1235 - protein, 16 aa, Artificial Sequence
  source: /note="Description of Artificial Sequence: Synthetic peptide"
RSSQSLVHSNGNTYLH

SEQ ID NO: 1236 - protein, 7 aa, Artificial Sequence
  source: /note="Description of Artificial Sequence: Synthetic peptide"
KVSNRFS

SEQ ID NO: 1237 - protein, 9 aa, Artificial Sequence
  source: /note="Description of Artificial Sequence: Synthetic peptide"
SQSTHVPFT

SEQ ID NO: 1238 - protein, 12 aa, Artificial Sequence
  source: /note="Description of Artificial Sequence: Synthetic peptide"
SQSLVHSNGNTY

SEQ ID NO: 1239 - protein, 112 aa, Artificial Sequence
  source: /note="Description of Artificial Sequence: Synthetic polypeptide"
NVVMTQTPLSLPVSLGDQASISCRSSQSLVHSNGNTYLHWYLQKPGQSPKFLIYKVSNRFSGVPDRFSGGGSGTEFTLKISRVEAEDLGVYFCSQSTHVPFTFGSGTKLEIK

SEQ ID NO: 1240 - protein, 120 aa, Artificial Sequence
  source: /note="Description of Artificial Sequence: Synthetic polypeptide"
NVQLQESGPGLVKPSQSLSLTCSVAGYSITSGYFWNWIRQFPGNKLEWMGYISYDGSNNYNPSLKNRISITRDTSKNQFFLKLNSVTTEDTATYYCASPSPGTGYAVDYWGQGTSVTVSS

SEQ ID NO: 1241 - protein, 120 aa, Artificial Sequence
  source: /note="Description of Artificial Sequence: Synthetic polypeptide"
QVQLQESGPGLVKPSETLSLTCTVSGYSITSGYFWNWIRQPPGKGLEWIGYISYDGSNNYNPSLKNRVTISRDTSKNQFSLKLSSVTAADTAVYYCASPSPGTGYAVDYWGQGTLVTVSS

SEQ ID NO: 1242 - protein, 120 aa, Artificial Sequence; identical to SEQ ID NO: 1241
  source: /note="Description of Artificial Sequence: Synthetic polypeptide"

SEQ ID NO: 1243 - protein, 120 aa, Artificial Sequence
  source: /note="Description of Artificial Sequence: Synthetic polypeptide"
QVQLVESGGGLVQPGGSLRLSCSVSGYSITSGYFWNWVRQAPGKGLEWVGYISYDGSNNYNPSLKNRFTISRDTSKNTFYLQMNSLRAEDTAVYYCASPSPGTGYAVDYWGQGTLVTVSS

SEQ ID NO: 1244 - protein, 111 aa, Artificial Sequence
  source: /note="Description of Artificial Sequence: Synthetic polypeptide"
VVMTQSPGTLSLSPGERATLSCRSSQSLVHSNGNTYLHWYQQKPGQAPRFLIYKVSNRFSGIPDRFSGSGSGTDFTLTISRLEPEDFAVYFCSQSTHVPFTFGQGTKLEIK

SEQ ID NO: 1245 - protein, 112 aa, Artificial Sequence
  source: /note="Description of Artificial Sequence: Synthetic polypeptide"
EVVMTQSPATLSLSPGERATLSCRSSQSLVHSNGNTYLHWYQQKPGQAPRFLIYKVSNRFSGIPARFSGSGSGTDFTLTISSLEPEDFAVYFCSQSTHVPFTFGQGTKLEIK

SEQ ID NO: 1246 - protein, 112 aa, Artificial Sequence
  source: /note="Description of Artificial Sequence: Synthetic polypeptide"
EVVMTQSPATLSVSPGERATLSCRSSQSLVHSNGNTYLHWYQQKPGQAPRFLIYKVSNRFSGIPARFSGSGSGTEFTLTISSLQSEDFAVYFCSQSTHVPFTFGQGTKLEIK

SEQ ID NO: 1247 - protein, 112 aa, Artificial Sequence
  source: /note="Description of Artificial Sequence: Synthetic polypeptide"
DVQMTQSPSSLSASVGDRVTITCRSSQSLVHSNGNTYLHWYQQKPGKAPKFLIYKVSNRFSGVPSRFSGSGSGTDFTFTISSLQPEDIATYFCSQSTHVPFTFGQGTKLEIK

SEQ ID NO: 1248 - protein, 5 aa, Artificial Sequence
  source: /note="Description of Artificial Sequence: Synthetic peptide"
DYIVH

SEQ ID NO: 1249 - protein, 17 aa, Artificial Sequence
  source: /note="Description of Artificial Sequence: Synthetic peptide"
WINTYTGTPTYADDFEG

SEQ ID NO: 1250 - protein, 13 aa, Artificial Sequence
  source: /note="Description of Artificial Sequence: Synthetic peptide"
SWRRGIRGIGFDY

SEQ ID NO: 1251 - protein, 7 aa, Artificial Sequence
  source: /note="Description of Artificial Sequence: Synthetic peptide"
GYTFTDY

SEQ ID NO: 1252 - protein, 6 aa, Artificial Sequence
  source: /note="Description of Artificial Sequence: Synthetic peptide"
NTYTGT

SEQ ID NO: 1253 - protein, 10 aa, Artificial Sequence
  source: /note="Description of Artificial Sequence: Synthetic peptide"
GYTFTDYIVH

SEQ ID NO: 1254 - protein, 11 aa, Artificial Sequence
  source: /note="Description of Artificial Sequence: Synthetic peptide"
KASKSINKYLA

SEQ ID NO: 1255 - protein, 7 aa, Artificial Sequence
  source: /note="Description of Artificial Sequence: Synthetic peptide"
DGSTLQS

SEQ ID NO: 1256 - protein, 9 aa, Artificial Sequence
  source: /note="Description of Artificial Sequence: Synthetic peptide"
QQHNEYPPT

SEQ ID NO: 1257 - protein, 7 aa, Artificial Sequence
  source: /note="Description of Artificial Sequence: Synthetic peptide"
SKSINKY

SEQ ID NO: 1258 - protein, 107 aa, Artificial Sequence
  source: /note="Description of Artificial Sequence: Synthetic polypeptide"
DVQMTQSPYNLAASPGESVSINCKASKSINKYLAWYQQKPGKPNKLLIYDGSTLQSGIPSRFSGSGSGTDFTLTIRGLEPEDFGLYYCQQHNEYPPTFGAGTKLELK

SEQ ID NO: 1259 - protein, 122 aa, Artificial Sequence
  source: /note="Description of Artificial Sequence: Synthetic polypeptide"
QLQLVQSGPELREPGESVKISCKASGYTFTDYIVHWVKQAPGKGLKWMGWINTYTGTPTYADDFEGRFVFSLEASASTANLQISNLKNEDTATYFCARSWRRGIRGIGFDYWGQGVMVTVSS

SEQ ID NO: 1260 - protein, 122 aa, Artificial Sequence
  source: /note="Description of Artificial Sequence: Synthetic polypeptide"
QLQLVQSGAEVKKPGASVKVSCKASGYTFTDYIVHWVRQAPGQGLEWMGWINTYTGTPTYADDFEGWVTMTLDASISTAYMELSRLRSDDTAVYYCARSWRRGIRGIGFDYWGQGTMVTVSS

SEQ ID NO: 1261 - protein, 122 aa, Artificial Sequence
  source: /note="Description of Artificial Sequence: Synthetic polypeptide"
QLQLVQSGAEVKKPGASVKVSCKASGYTFTDYIVHWVRQAPGQGLEWMGWINTYTGTPTYADDFEGRVTMTLDASTSTAYMELSSLRSEDTAVYYCARSWRRGIRGIGFDYWGQGTMVTVSS

SEQ ID NO: 1262 - protein, 122 aa, Artificial Sequence
  source: /note="Description of Artificial Sequence: Synthetic polypeptide"
QLQLVQSGAEVKKPGASVKVSCKASGYTFTDYIVHWVRQAPGQRLEWMGWINTYTGTPTYADDFEGRVTITLDASASTAYMELSSLRSEDMAVYYCARSWRRGIRGIGFDYWGQGTMVTVSS

SEQ ID NO: 1263 - protein, 122 aa, Artificial Sequence
  source: /note="Description of Artificial Sequence: Synthetic polypeptide"
QLQLVQSGAEVKKPGASVKVSCKASGYTFTDYIVHWVRQATGQGLEWMGWINTYTGTPTYADDFEGRVTMTLNASISTAYMELSSLRSEDTAVYYCARSWRRGIRGIGFDYWGQGTMVTVSS

SEQ ID NO: 1264 - protein, 107 aa, Artificial Sequence
  source: /note="Description of Artificial Sequence: Synthetic polypeptide"
EVVMTQSPGTLSLSPGERATLSCKASKSINKYLAWYQQKPGQAPRLLIYDGSTLQSGIPDRFSGSGSGTDFTLTISRLEPEDFAVYYCQQHNEYPPTFGQGTKLEIK

SEQ ID NO: 1265 - protein, 107 aa, Artificial Sequence
  source: /note="Description of Artificial Sequence: Synthetic polypeptide"
EVVMTQSPATLSLSPGERATLSCKASKSINKYLAWYQQKPGQAPRLLIYDGSTLQSGIPARFSGSGSGTDFTLTISSLEPEDFAVYYCQQHNEYPPTFGQGTKLEIK

SEQ ID NO: 1266 - protein, 107 aa, Artificial Sequence
  source: /note="Description of Artificial Sequence: Synthetic polypeptide"
DVQMTQSPSSLSASVGDRVTITCKASKSINKYLAWYQQKPGKAPKLLIYDGSTLQSGVPSRFSGSGSGTDFTLTISSLQPEDFATYYCQQHNEYPPTFGQGTKLEIK

SEQ ID NO: 1267 - protein, 107 aa, Artificial Sequence
  source: /note="Description of Artificial Sequence: Synthetic polypeptide"
AVRMTQSPSSFSASTGDRVTITCKASKSINKYLAWYQQKPGKAPKLLIYDGSTLQSGVPSRFSGSGSGTDFTLTISCLQSEDFATYYCQQHNEYPPTFGQGTKLEIK

SEQ ID NO: 1268 - protein, 5 aa, Artificial Sequence
  source: /note="Description of Artificial Sequence: Synthetic peptide"
NYGVH

SEQ ID NO: 1269 - protein, 16 aa, Artificial Sequence
  source: /note="Description of Artificial Sequence: Synthetic peptide"
VIWSDGSTDYDTAFIS

SEQ ID NO: 1270 - protein, 9 aa, Artificial Sequence
  source: /note="Description of Artificial Sequence: Synthetic peptide"
RAVVADFDY

SEQ ID NO: 1271 - protein, 6 aa, Artificial Sequence
  source: /note="Description of Artificial Sequence: Synthetic peptide"
GFSLTN

SEQ ID NO: 1272 - protein, 9 aa, Artificial Sequence
  source: /note="Description of Artificial Sequence: Synthetic peptide"
VIWSDGSTD

SEQ ID NO: 1273 - protein, 10 aa, Artificial Sequence
  source: /note="Description of Artificial Sequence: Synthetic peptide"
GFSLTNYGVH

SEQ ID NO: 1274 - protein, 117 aa, Artificial Sequence
  source: /note="Description of Artificial Sequence: Synthetic polypeptide"
QVQLKQSGPGLLQPSQSLSITCTVSGFSLTNYGVHWVRQSPGKGLEWLGVIWSDGSTDYDTAFISRLSISKDNSKSQVFFKLNSLQADDTAIYYCARRAVVADFDYWGQGTTLTVSS

SEQ ID NO: 1275 - protein, 16 aa, Artificial Sequence
  source: /note="Description of Artificial Sequence: Synthetic peptide"
KASKEVTIFGSISALH

SEQ ID NO: 1276 - protein, 7 aa, Artificial Sequence
  source: /note="Description of Artificial Sequence: Synthetic peptide"
NGAKLES

SEQ ID NO: 1277 - protein, 9 aa, Artificial Sequence
  source: /note="Description of Artificial Sequence: Synthetic peptide"
LQNKEVPFT

SEQ ID NO: 1278 - protein, 119 aa, Artificial Sequence
  source: /note="Description of Artificial Sequence: Synthetic polypeptide"
DIVLTQSPASLAVSLGQKATISCKASKEVTIFGSISALHWYQQKPGQPPKLIYNGAKLESGVSARFSDSGSQNRSPFGNQLSFTLTIAPVEADDAATYYCLQNKEVPFTFGSGTKLEIK

SEQ ID NO: 1279 - protein, 117 aa, Artificial Sequence
  source: /note="Description of Artificial Sequence: Synthetic polypeptide"
DIVLTQSPDSLAVSLGERATINCKASKEVTIFGSISALHWYQQKPGQPPKLLYNGAKLESGVSARFGVPDRFSRSGSGLDFTLTISSLQAEDVAVYYCLQNKEVPFTFGQGTKLEIK

SEQ ID NO: 1280 - protein, 117 aa, Artificial Sequence
  source: /note="Description of Artificial Sequence: Synthetic polypeptide"
EIVLTQSPDFQSVTPKEKVTITCKASKEVTIFGSISALHWYQQKPDQSPKLLYNGAKLESGVSARFGVPSRFSRSGSGLDFTLTINSLEAEDAATYYCLQNKEVPFTFGQGTKLEIK

SEQ ID NO: 1281 - protein, 117 aa, Artificial Sequence
  source: /note="Description of Artificial Sequence: Synthetic polypeptide"
AIQLTQSPSSLSASVGDRVTITCKASKEVTIFGSISALHWYQQKPGKAPKLLYNGAKLESGVSARFGVPSRFSRSGSGLDFTLTISSLQPEDFATYYCLQNKEVPFTFGQGTKLEIK

SEQ ID NO: 1282 - protein, 117 aa, Artificial Sequence
  source: /note="Description of Artificial Sequence: Synthetic polypeptide"
DIVLTQTPLSLSVTPGQPASISCKASKEVTIFGSISALHWYLQKPGQPPKLLYNGAKLESGVSARFGVPDRFSRSGSGLDFTLKISRVEAEDVGVYYCLQNKEVPFTFGQGTKLEIK

SEQ ID NO: 1283 - protein, 117 aa, Artificial Sequence
  source: /note="Description of Artificial Sequence: Synthetic polypeptide"
QVTLKESGPVLVKPTETLTLTCTVSGFSLTNYGVHWVRQPPGKALEWLGVIWSDGSTDYDTAFISRLTISKDNSKSQVVLTMTNMDPVDTATYYCARRAVVADFDYWGQGTTVTVSS

SEQ ID NO: 1284 - protein, 117 aa, Artificial Sequence
  source: /note="Description of Artificial Sequence: Synthetic polypeptide"
QVQLQESGPGLVKPSGTLSLTCAVSGFSLTNYGVHWVRQPPGKGLEWLGVIWSDGSTDYDTAFISRLTISKDNSKSQVSLKLSSVTAADTAVYYCARRAVVADFDYWGQGTTVTVSS

SEQ ID NO: 1285 - protein, 117 aa, Artificial Sequence
  source: /note="Description of Artificial Sequence: Synthetic polypeptide"
QVQLQQSGPGLVKPSQTLSLTCAVSGFSLTNYGVHWVRQSPSRGLEWLGVIWSDGSTDYDTAFISRLTINKDNSKSQVSLQLNSVTPEDTAVYYCARRAVVADFDYWGQGTTVTVSS

SEQ ID NO: 1286 - protein, 117 aa, Artificial Sequence
  source: /note="Description of Artificial Sequence: Synthetic polypeptide"
EVQLVESGGGLVQPGPSLRLSCTVSGFSLTNYGVHWVRQAPGKGLEWLGVIWSDGSTDYDTAFISRLTISKDNSKSIVYLQMNSLKTEDTAVYYCARRAVVADFDYWGQGTTVTVSS

SEQ ID NO: 1287 - protein, 117 aa, Artificial Sequence
  source: /note="Description of Artificial Sequence: Synthetic polypeptide"
EVQLVQSGAEVKKPGESLRISCKVSGFSLTNYGVHWVRQMPGKGLEWLGVIWSDGSTDYDTAFISQLTISKDNSISTVYLQWSSLKASDTAMYYCARRAVVADFDYWGQGTTVTVSS

SEQ ID NO: 1288 - protein, 5 aa, Artificial Sequence
  source: /note="Description of Artificial Sequence: Synthetic peptide"
SYGMS

SEQ ID NO: 1289 - protein, 17 aa, Artificial Sequence
  source: /note="Description of Artificial Sequence: Synthetic peptide"
LISSGGSYTYYTDSVKG

SEQ ID NO: 1290 - protein, 8 aa, Artificial Sequence
  source: /note="Description of Artificial Sequence: Synthetic peptide"
HGGNFFDY

SEQ ID NO: 1291 - protein, 7 aa, Artificial Sequence
  source: /note="Description of Artificial Sequence: Synthetic peptide"
GFTFRSY

SEQ ID NO: 1292 - protein, 6 aa, Artificial Sequence
  source: /note="Description of Artificial Sequence: Synthetic peptide"
SSGGSY

SEQ ID NO: 1293 - protein, 10 aa, Artificial Sequence
  source: /note="Description of Artificial Sequence: Synthetic peptide"
GFTFRSYGMS

SEQ ID NO: 1294 - protein, 10 aa, Artificial Sequence
  source: /note="Description of Artificial Sequence: Synthetic peptide"
SVSSSVSYMH

SEQ ID NO: 1295 - protein, 7 aa, Artificial Sequence
  source: /note="Description of Artificial Sequence: Synthetic peptide"
DTSKLAS

SEQ ID NO: 1296 - protein, 10 aa, Artificial Sequence
  source: /note="Description of Artificial Sequence: Synthetic peptide"
QQWSSNPQYT

SEQ ID NO: 1297 - protein, 6 aa, Artificial Sequence
  source: /note="Description of Artificial Sequence: Synthetic peptide"
SSSVSY

SEQ ID NO: 1298 - protein, 5 aa, Artificial Sequence
  source: /note="Description of Artificial Sequence: Synthetic peptide"
SSWMN

SEQ ID NO: 1299 - protein, 17 aa, Artificial Sequence
  source: /note="Description of Artificial Sequence: Synthetic peptide"
RIYPGDGDTKYNGKFKG

SEQ ID NO: 1300 - protein, 10 aa, Artificial Sequence
  source: /note="Description of Artificial Sequence: Synthetic peptide"
RGTGGWYFDV

SEQ ID NO: 1301 - protein, 10 aa, Artificial Sequence
  source: /note="Description of Artificial Sequence: Synthetic peptide"
RGTGGWYFDV

SEQ ID NO: 1302 - protein, 7 aa, Artificial Sequence
  source: /note="Description of Artificial Sequence: Synthetic peptide"
GYAFSSS

SEQ ID NO: 1303 - protein, 6 aa, Artificial Sequence
  source: /note="Description of Artificial Sequence: Synthetic peptide"
YPGDGD

SEQ ID NO: 1304 - protein, 10 aa, Artificial Sequence
  source: /note="Description of Artificial Sequence: Synthetic peptide"
GYAFSSSWMN

SEQ ID NO: 1305 - protein, 15 aa, Artificial Sequence
  source: /note="Description of Artificial Sequence: Synthetic peptide"
RASESVDSSGNSFMH

SEQ ID NO: 1306 - protein, 7 aa, Artificial Sequence
  source: /note="Description of Artificial Sequence: Synthetic peptide"
RASNLES

SEQ ID NO: 1307 - protein, 9 aa, Artificial Sequence
  source: /note="Description of Artificial Sequence: Synthetic peptide"
QQSFDDPFT

SEQ ID NO: 1308 - protein, 11 aa, Artificial Sequence
  source: /note="Description of Artificial Sequence: Synthetic peptide"
SESVDSSGNSF

SEQ ID NO: 1309 - protein, 246 aa, Artificial Sequence
  source: /note="Description of Artificial Sequence: Synthetic polypeptide"
QVQLVQSGAEVKKPGSSVKVSCKASGHDFDKFYIHWVRQAPGQGLEWMGRVSAGSGNVKYNEKFKGRVTITADTSTSTAYMELSSLRSEDTAVYYCAGSYYSYDVLDYWGQGTTVTVSSGGGGSGGGGSGGGGSGGGGSDIQMTQSPSFLSASVGDRVTITCKASQNVGNRVAWYQQKPGKAPKALIYSSSHRYKGVPSRFSGSGSGTEFTLTISSLQPEDFATYFCQQFKSYPLTFGQGTKLEIK

SEQ ID NO: 1310 - protein, 119 aa, Artificial Sequence; identical to SEQ ID NO: 94
  source: /note="Description of Artificial Sequence: Synthetic polypeptide"

SEQ ID NO: 1311 - protein, 119 aa, Artificial Sequence
  source: /note="Description of Artificial Sequence: Synthetic polypeptide"
QVQLVQSGAEVKKPGSSVKVSCKASGTDFKLTYIHWVRQAPGQGLEWMGRIFPGSGNVKYNEKFKGRVTITADTSTSTAYMELSSLRSEDTAVYYCAVSYYSYDVLDYWGQGTTVTVSS

SEQ ID NO: 1312 - protein, 119 aa, Artificial Sequence
  source: /note="Description of Artificial Sequence: Synthetic polypeptide"
QVQLVQSGAEVKKPGSSVKVSCKASGHDFRLTYIHWVRQAPGQGLEWMGRISAGSGNVKYNEKFKGRVTITADTSTSTAYMELSSLRSEDTAVYYCAVSYYSYDVLDYWGQGTTVTVSS

SEQ ID NO: 1313 - protein, 107 aa, Artificial Sequence; identical to SEQ ID NO: 90
  source: /note="Description of Artificial Sequence: Synthetic polypeptide"

SEQ ID NO: 1314 - protein, 107 aa, Artificial Sequence; identical to SEQ ID NO: 141
  source: /note="Description of Artificial Sequence: Synthetic polypeptide"

SEQ ID NO: 1315 - protein, 5 aa, Artificial Sequence
  source: /note="Description of Artificial Sequence: Synthetic peptide"
AYGVN

SEQ ID NO: 1316 - protein, 16 aa, Artificial Sequence
  source: /note="Description of Artificial Sequence: Synthetic peptide"
MIWGDGNTDYNSALKS

SEQ ID NO: 1317 - protein, 12 aa, Artificial Sequence
  source: /note="Description of Artificial Sequence: Synthetic peptide"
DRVTATLYAMDY

SEQ ID NO: 1318 - protein, 7 aa, Artificial Sequence
  source: /note="Description of Artificial Sequence: Synthetic peptide"
GFSLTAY

SEQ ID NO: 1319 - protein, 5 aa, Artificial Sequence
  source: /note="Description of Artificial Sequence: Synthetic peptide"
WGDGN

SEQ ID NO: 1320 - protein, 10 aa, Artificial Sequence
  source: /note="Description of Artificial Sequence: Synthetic peptide"
GFSLTAYGVN

SEQ ID NO: 1321 - protein, 11 aa, Artificial Sequence
  source: /note="Description of Artificial Sequence: Synthetic peptide"
SASQGISNYLN

SEQ ID NO: 1322 - protein, 7 aa, Artificial Sequence
  source: /note="Description of Artificial Sequence: Synthetic peptide"
YTSSLHS

SEQ ID NO: 1323 - protein, 9 aa, Artificial Sequence
  source: /note="Description of Artificial Sequence: Synthetic peptide"
QQYSKLPRT

SEQ ID NO: 1324 - protein, 107 aa, Artificial Sequence
  source: /note="Description of Artificial Sequence: Synthetic polypeptide"
DIQMTQSPSSLSASVGDRVTITCSASQGISNYLNWYQQTPGKAPKLLIYYTSSLHSGVPSRFSGSGSGTDYTFTISSLQPEDIATYYCQQYSKLPRTFGQGTKLQIT

SEQ ID NO: 1325 - protein, 120 aa, Artificial Sequence
  source: /note="Description of Artificial Sequence: Synthetic polypeptide"
QVQLQESGPGLVRPSQTLSLTCTVSGFSLTAYGVNWVRQPPGRGLEWLGMIWGDGNTDYNSALKSRVTMLKDTSKNQFSLRLSSVTAADTAVYYCARDRVTATLYAMDYWGQGSLVTVSS

SEQ ID NO: 1326 - protein, 246 aa, Artificial Sequence
  source: /note="Description of Artificial Sequence: Synthetic polypeptide"
QVQLVQSGAEVKKPGSSVKVSCKASGHDFRLTYIHWVRQAPGQGLEWMGRVSAGSGNTKYNEKFKGRVTITADTSTSTAYMELSSLRSEDTAVYYCAVSYYSYDVLDYWGQGTTVTVSSGGGGSGGGGSGGGGSGGGGSDIQMTQSPSFLSASVGDRVTITCKASQNVGDRVVWHQQKPGKAPKALIYSSSHRYKGVPSRFSGSGSGTEFTLTISSLQPEDFATYFCQQFKSYPLTFGQGTKLEIK

SEQ ID NO: 1327 - protein, 246 aa, Artificial Sequence
  source: /note="Description of Artificial Sequence: Synthetic polypeptide"
QVQLVQSGAEVKKPGSSVKVSCKASGHDFRLTYIHWVRQAPGQGLEWMGRVSAGSGNVKYNEKFKGRVTITADTSTSTAYMELSSLRSEDTAVYYCAVSYYSYDVLDYWGQGTTVTVSSGGGGSGGGGSGGGGSGGGGSDIQMTQSPSFLSASVGDRVTITCKASQNVGNRVVWHQQKPGKAPKALIYSSSHRYKGVPSRFSGSGSGTEFTLTISSLQPEDFATYFCQQFKSYPLTFGQGTKLEIK

SEQ ID NO: 1328 - protein, 246 aa, Artificial Sequence
  source: /note="Description of Artificial Sequence: Synthetic polypeptide"
QVQLVQSGAEVKKPGSSVKVSCKASGHDFRLTYIHWVRQAPGQGLEWMGRIYAGSGNVKYNEKFKGRVTITADTSTSTAYMELSSLRSEDTAVYYCAVSYYSYDVLDYWGQGTTVTVSSGGGGSGGGGSGGGGSGGGGSDIQMTQSPSFLSASVGDRVTITCKASQNVADRVVWHQQKPGKAPKALIYSSSHRYKGVPSRFSGSGSGTEFTLTISSLQPEDFATYFCQQFKSYPLTFGQGTKLEIK

SEQ ID NO: 1329 - protein, 246 aa, Artificial Sequence
  source: /note="Description of Artificial Sequence: Synthetic polypeptide"
QVQLVQSGAEVKKPGSSVKVSCKASGHDFKLTYIHWVRQAPGQGLEWMGRVSAGSGNTKYNEKFKGRVTITADTSTSTAYMELSSLRSEDTAVYYCAVSYYSYDVLDYWGQGTTVTVSSGGGGSGGGGSGGGGSGGGGSDIQMTQSPSFLSASVGDRVTITCKASQNVGDRVAWHQQKPGKAPKALIYSSSHRYKGVPSRFSGSGSGTEFTLTISSLQPEDFATYFCQQFKSYPLTFGQGTKLEIK

SEQ ID NO: 1330 - protein, 246 aa, Artificial Sequence
  source: /note="Description of Artificial Sequence: Synthetic polypeptide"
QVQLVQSGAEVKKPGSSVKVSCKASGHDFKLTYIHWVRQAPGQGLEWMGRVSAGSGNTKYNEKFKGRVTITADTSTSTAYMELSSLRSEDTAVYYCAVSYYSYDVLDYWGQGTTVTVSSGGGGSGGGGSGGGGSGGGGSDIQMTQSPSFLSASVGDRVTITCKASQNVDNRVAWHQQKPGKAPKALIYSSSHRYKGVPSRFSGSGSGTEFTLTISSLQPEDFATYFCQQFKSYPLTFGQGTKLEIK

SEQ ID NO: 1331 - protein, 246 aa, Artificial Sequence
  source: /note="Description of Artificial Sequence: Synthetic polypeptide"
QVQLVQSGAEVKKPGSSVKVSCKASGHDFRLTYIHWVRQAPGQGLEWMGRVSAGSGNVKYNEKFKGRVTITADTSTSTAYMELSSLRSEDTAVYYCAVSYYSYDVLDYWGQGTTVTVSSGGGGSGGGGSGGGGSGGGGSDIQMTQSPSFLSASVGDRVTITCKASQNVADRVVWHQQKPGKAPKALIYSSSHRYKGVPSRFSGSGSGTEFTLTISSLQPEDFATYFCQQFKSYPLTFGQGTKLEIK

SEQ ID NO: 1332 - protein, 246 aa, Artificial Sequence
  source: /note="Description of Artificial Sequence: Synthetic polypeptide"
QVQLVQSGAEVKKPGSSVKVSCKASGHDFRLTYIHWVRQAPGQGLEWMGRVYAGSGNTKYNEKFKGRVTITADTSTSTAYMELSSLRSEDTAVYYCAVSYYSYDVLDYWGQGTTVTVSSGGGGSGGGGSGGGGSGGGGSDIQMTQSPSFLSASVGDRVTITCKASQNVEDRVVWHQQKPGKAPKALIYSSSHRYKGVPSRFSGSGSGTEFTLTISSLQPEDFATYFCQQFKSYPLTFGQGTKLEIK

SEQ ID NO: 1333 - protein, 246 aa, Artificial Sequence
  source: /note="Description of Artificial Sequence: Synthetic polypeptide"
QVQLVQSGAEVKKPGSSVKVSCKASGHDFKLTYIHWVRQAPGQGLEWMGRVSAGSGNTKYNEKFKGRVTITADTSTSTAYMELSSLRSEDTAVYYCAVSYYSYDVLDYWGQGTTVTVSSGGGGSGGGGSGGGGSGGGGSDIQMTQSPSFLSASVGDRVTITCKASQNVADRVVWHQQKPGKAPKALIYSSSHRYKGVPSRFSGSGSGTEFTLTISSLQPEDFATYFCQQFKSYPLTFGQGTKLEIK

SEQ ID NO: 1334 - protein, 246 aa, Artificial Sequence
  source: /note="Description of Artificial Sequence: Synthetic polypeptide"
QVQLVQSGAEVKKPGSSVKVSCKASGHDFKLTYIHWVRQAPGQGLEWMGRISAGSGNTKYNEKFKGRVTITADTSTSTAYMELSSLRSEDTAVYYCAVSYYSYDVLDYWGQGTTVTVSSGGGGSGGGGSGGGGSGGGGSDIQMTQSPSFLSASVGDRVTITCKASQNVGDRVVWHQQKPGKAPKALIYSSSHRYKGVPSRFSGSGSGTEFTLTISSLQPEDFATYFCQQFKSYPLTFGQGTKLEIK

SEQ ID NO: 1335 - protein, 246 aa, Artificial Sequence
  source: /note="Description of Artificial Sequence: Synthetic polypeptide"
QVQLVQSGAEVKKPGSSVKVSCKASGHDFKLTYIHWVRQAPGQGLEWMGRIYAGSGNTKYNEKFKGRVTITADTSTSTAYMELSSLRSEDTAVYYCAVSYYSYDVLDYWGQGTTVTVSSGGGGSGGGGSGGGGSGGGGSDIQMTQSPSFLSASVGDRVTITCKASQNVGDRVVWHQQKPGKAPKALIYSSSHRYKGVPSRFSGSGSGTEFTLTISSLQPEDFATYFCQQFKSYPLTFGQGTKLEIK

SEQ ID NO: 1336 - protein, 246 aa, Artificial Sequence
  source: /note="Description of Artificial Sequence: Synthetic polypeptide"
QVQLVQSGAEVKKPGSSVKVSCKASGTDFKLTYIHWVRQAPGQGLEWMGRIFPGSGNVKYNEKFKGRVTITADTSTSTAYMELSSLRSEDTAVYYCAVSYYSYDVLDYWGQGTTVTVSSGGGGSGGGGSGGGGSGGGGSDIQMTQSPSFLSASVGDRVTITCKASQNVDNRVAWYQQKPGKAPKALIYSSSHRYKGVPSRFSGSGSGTEFTLTISSLQPEDFATYFCQQFKSYPLTFGQGTKLEIK

SEQ ID NO: 1337 - protein, 246 aa, Artificial Sequence
  source: /note="Description of Artificial Sequence: Synthetic polypeptide"
QVQLVQSGAEVKKPGSSVKVSCKASGHDFRLTYIHWVRQAPGQGLEWMGRISAGSGNVKYNEKFKGRVTITADTSTSTAYMELSSLRSEDTAVYYCAVSYYSYDVLDYWGQGTTVTVSSGGGGSGGGGSGGGGSGGGGSDIQMTQSPSFLSASVGDRVTITCKASQNVADRVAWYQQKPGKAPKALIYSSSHRYKGVPSRFSGSGSGTEFTLTISSLQPEDFATYFCQQFKSYPLTFGQGTKLEIK

SEQ ID NO: 1338 - protein, 243 aa, Artificial Sequence
  source: /note="Description of Artificial Sequence: Synthetic polypeptide"
EVQLVESGGGLVQPGGSLRLSCAASGFTFSNFGMHWVRQAPGKGLEWVSYISSGSSTIYYADTLKGRFTISRDNSKNTLYLQMNSLRAEDTAVYYCARRGEGAMDYWGQGTTVTVSSGGGGSGGGGSGGGGSGGGGSDNQLTQSPSSLSASVGDRVTITCRASSSVNYIYWYQQKPGKAPKLLIYYTSNLAPGVPSRFSGSGSGNDYTLTISSLQPEDFATYYCQQFTSSPFTFGQGTKLEIK

SEQ ID NO: 1339 - protein, 242 aa, Artificial Sequence
  source: /note="Description of Artificial Sequence: Synthetic polypeptide"
EVQLVESGGGLVQPGGSLRLSCAASGFTFSNFGMHWVRQAPGKGLEWVSYISSGSSTIYYADTLKGRFTISRDNSKNTLYLQMNSLRAEDTAVYYCARRGEGAMDYWGQGTTVTVSSGGGGSGGGGSGGGGSGGGGSSNELTQPPSVSVSPGQTARITCRASSSVNYIYWYQQKSGQAPVLVIYYTSNLAPGIPERFSGSGSGNMYTLTISGAQVEDEADYYCQQFTSSPFTFGTGTKVTVL

SEQ ID NO: 1340 - protein, 243 aa, Artificial Sequence
  source: /note="Description of Artificial Sequence: Synthetic polypeptide"
QVQLVESGGGVVQPGRSLRLSCAASGFTFSNFGMHWVRQAPGKGLEWVAYISSGSSTIYYADTLKGRFTISRDNSKNTLYLQMNSLRAEDTAVYYCARRGEGAMDYWGQGTTVTVSSGGGGSGGGGSGGGGSGGGGSDNQLTQSPSFLSASVGDRVTITCRASSSVNYIYWYQQKPGKAPKLLIYYTSNLAPGVPSRFSGSGSGNEYTLTISSLQPEDFATYYCQQFTSSPFTFGQGTKLEIK

SEQ ID NO: 1341 - protein, 243 aa, Artificial Sequence
  source: /note="Description of Artificial Sequence: Synthetic polypeptide"
QVQLVESGGGVVQPGRSLRLSCAASGFTFSNFGMHWVRQAPGKGLEWVAYISSGSSTIYYADTLKGRFTISRDNSKNTLYLQMNSLRAEDTAVYYCARRGEGAMDYWGQGTTVTVSSGGGGSGGGGSGGGGSGGGGSDNQLTQSPSSLSASVGDRVTITCRASSSVNYIYWYQQKPGKAPKLLIYYTSNLAPGVPSRFSGSGSGNDYTLTISSLQPEDFATYYCQQFTSSPFTFGQGTKLEIK

SEQ ID NO: 1342 - protein, 242 aa, Artificial Sequence
  source: /note="Description of Artificial Sequence: Synthetic polypeptide"
QVQLVESGGGVVQPGRSLRLSCAASGFTFSNFGMHWVRQAPGKGLEWVAYISSGSSTIYYADTLKGRFTISRDNSKNTLYLQMNSLRAEDTAVYYCARRGEGAMDYWGQGTTVTVSSGGGGSGGGGSGGGGSGGGGSSNELTQPPSVSVSPGQTARITCRASSSVNYIYWYQQKSGQAPVLVIYYTSNLAPGIPERFSGSGSGNMYTLTISGAQVEDEADYYCQQFTSSPFTFGTGTKVTVL

SEQ ID NO: 1343 - protein, 243 aa, Artificial Sequence
  source: /note="Description of Artificial Sequence: Synthetic polypeptide"
EVQLVESGGGLVQPGGSLRLSCAASGFTFSNFGMHWVRQAPGKGLEWVSYISSGSSTIYYADTLKGRFTISRDNSKNTLYLQMNSLRAEDTAVYYCARRGEGAMDYWGQGTTVTVSSGGGGSGGGGSGGGGSGGGGSDNQLTQSPSFLSASVGDRVTITCRASSSVNYIYWYQQKPGKAPKLLIYYTSNLAPGVPSRFSGSGSGNEYTLTISSLQPEDFATYYCQQFTSSPFTFGQGTKLEIK

SEQ ID NO: 1344 - protein, 246 aa, Artificial Sequence; identical to SEQ ID NO: 110
  source: /note="Description of Artificial Sequence: Synthetic polypeptide"

SEQ ID NO: 1345-2999 - skipped (1655 entries)

SEQ ID NO: 3000 - protein, 107 aa, Artificial Sequence
  source: /note="Description of Artificial Sequence: Synthetic polypeptide"
DIQMTQSPSFLSASVGDRVTITCSASQGISNYLNWYQQKPGKAVKLLIYYTSSLHSGVPSRFSGSGSGTEYTLTISSLQPEDFATYYCQQYSKLPRTFGGGTKVEIK

SEQ ID NO: 3001 - protein, 107 aa, Artificial Sequence
  source: /note="Description of Artificial Sequence: Synthetic polypeptide"
DIQMTQSPSSLSASVGDRVTITCSASQGISNYLNWYQQKPGKAVKLLIYYTSSLHSGVPSRFSGSGSGTDYTLTISSLQPEDFATYYCQQYSKLPRTFGGGTKVEIK

SEQ ID NO: 3002 - protein, 107 aa, Artificial Sequence
  source: /note="Description of Artificial Sequence: Synthetic polypeptide"
DIQMTQSPSSLSASVGDRVTITCSASQGISNYLNWYQQKPGKVVKLLIYYTSSLHSGVPSRFSGSGSGTDYTLTISSLQPEDVATYYCQQYSKLPRTFGGGTKVEIK

SEQ ID NO: 3003 - protein, 107 aa, Artificial Sequence
  source: /note="Description of Artificial Sequence: Synthetic polypeptide"
DIQMTQSPSSLSASVGDRVTITCSASQGISNYLNWYQQKPGQAVKLLIYYTSSLHSGVPSRFSGSGSGTDYTLTISSLQPEDVATYYCQQYSKLPRTFGGGTKVEIK

SEQ ID NO: 3004 - protein, 107 aa, Artificial Sequence
  source: /note="Description of Artificial Sequence: Synthetic polypeptide"
DIQMTQSPSSLSASVGDRVTITCSASQGISNYLNWYQQKPGKAVKLLIYYTSSLHSGVPSRFSGSGSGTDYTFTISSLQPEDIATYYCQQYSKLPRTFGGGTKVEIK

SEQ ID NO: 3005 - protein, 107 aa, Artificial Sequence
  source: /note="Description of Artificial Sequence: Synthetic polypeptide"
DIQMTQSPSSLSASVGDRVTITCSASQGISNYLNWYQQKPGKTVKLLIYYTSSLHSGIPSRFSGSGSGTDYTLTIRSLQPEDFATYYCQQYSKLPRTFGGGTKVEIK

SEQ ID NO: 3006 - protein, 107 aa, Artificial Sequence
  source: /note="Description of Artificial Sequence: Synthetic polypeptide"
AIQMTQSPSSLSASVGDRVTITCSASQGISNYLNWYQQKPGKAVKLLIYYTSSLHSGVPSRFSGSGSGTDYTLTISSLQPEDFATYYCQQYSKLPRTFGGGTKVEIK

SEQ ID NO: 3007 - protein, 107 aa, Artificial Sequence
  source: /note="Description of Artificial Sequence: Synthetic polypeptide"
DIQMTQSPSSVSASVGDRVTITCSASQGISNYLNWYQQKPGKAVKLLIYYTSSLHSGVPSRFSGSGSGTDYTLTISSLQPEDFATYYCQQYSKLPRTFGGGTKVEIK

SEQ ID NO: 3008 - protein, 107 aa, Artificial Sequence
  source: /note="Description of Artificial Sequence: Synthetic polypeptide"
DIQMTQSPSSLSASVGDRVTITCSASQGISNYLNWYQQKPGKAVKRLIYYTSSLHSGVPSRFSGSGSGTEYTLTISNLQPEDFATYYCQQYSKLPRTFGGGTKVEIK

SEQ ID NO: 3009 - protein, 107 aa, Artificial Sequence
  source: /note="Description of Artificial Sequence: Synthetic polypeptide"
AIRMTQSPFSLSASVGDRVTITCSASQGISNYLNWYQQKPAKAVKLFIYYTSSLHSGVPSRFSGSGSGTDYTLTISSLQPEDFATYYCQQYSKLPRTFGGGTKVEIK

SEQ ID NO: 3010 - protein, 107 aa, Artificial Sequence
  source: /note="Description of Artificial Sequence: Synthetic polypeptide"
DIQMTQSPSSLSASVGDRVTITCSASQGISNYLNWYQQKPGKAVKRLIYYTSSLHSGVPSRFSGSGSGTEYTLTISSLQPEDFATYYCQQYSKLPRTFGGGTKVEIK

SEQ ID NO: 3011 - protein, 107 aa, Artificial Sequence
  source: /note="Description of Artificial Sequence: Synthetic polypeptide"
DIQMTQSPSTLSASVGDRVTITCSASQGISNYLNWYQQKPGKAVKLLIYYTSSLHSGVPSRFSGSGSGTEYTLTISSLQPDDFATYYCQQYSKLPRTFGGGTKVEIK

SEQ ID NO: 3012 - protein, 107 aa, Artificial Sequence
  source: /note="Description of Artificial Sequence: Synthetic polypeptide"
DIQMTQSPSSLSASVGDRVTITCSASQGISNYLNWYQQKPGKAVKSLIYYTSSLHSGVPSRFSGSGSGTDYTLTISSLQPEDFATYYCQQYSKLPRTFGGGTKVEIK

SEQ ID NO: 3013 - protein, 107 aa, Artificial Sequence
  source: /note="Description of Artificial Sequence: Synthetic polypeptide"
DIQMTQSPSSLSASVGDRVTITCSASQGISNYLNWYQQKPGKAVKSLIYYTSSLHSGVPSKFSGSGSGTDYTLTISSLQPEDFATYYCQQYSKLPRTFGGGTKVEIK

SEQ ID NO: 3014 - protein, 107 aa, Artificial Sequence
  source: /note="Description of Artificial Sequence: Synthetic polypeptide"
DIQMTQSPSSLSASVGDRVTITCSASQGISNYLNWYQQKPEKAVKSLIYYTSSLHSGVPSRFSGSGSGTDYTLTISSLQPEDFATYYCQQYSKLPRTFGGGTKVEIK

SEQ ID NO: 3015 - protein, 107 aa, Artificial Sequence
  source: /note="Description of Artificial Sequence: Synthetic polypeptide"
DIQMTQSPSAMSASVGDRVTITCSASQGISNYLNWYQQKPGKVVKRLIYYTSSLHSGVPSRFSGSGSGTEYTLTISSLQPEDFATYYCQQYSKLPRTFGGGTKVEIK

SEQ ID NO: 3016 - protein, 107 aa, Artificial Sequence
  source: /note="Description of Artificial Sequence: Synthetic polypeptide"
DIVMTQSPDSLAVSLGERATINCSASQGISNYLNWYQQKPGQPVKLLIYYTSSLHSGVPDRFSGSGSGTDYTLTISSLQAEDVAVYYCQQYSKLPRTFGGGTKVEIK

SEQ ID NO: 3017 - protein, 107 aa, Artificial Sequence
  source: /note="Description of Artificial Sequence: Synthetic polypeptide"
EIVMTQSPGTLSLSPGERATLSCSASQGISNYLNWYQQKPGQAVKLLIYYTSSLHSGIPDRFSGSGSGTDYTLTISRLEPEDFAVYYCQQYSKLPRTFGGGTKVEIK

SEQ ID NO: 3018 - protein, 107 aa, Artificial Sequence
  source: /note="Description of Artificial Sequence: Synthetic polypeptide"
EIVMTQSPPTLSLSPGERVTLSCSASQGISNYLNWYQQKPGQAVKLLIYYTSSLHSGIPARFSGSGSGTDYTLTISSLQPEDFAVYYCQQYSKLPRTFGGGTKVEIK

SEQ ID NO: 3019 - protein, 107 aa, Artificial Sequence
  source: /note="Description of Artificial Sequence: Synthetic polypeptide"
EIVMTQSPPTLSLSPGERVTLSCSASQGISNYLNWYQQKPGQAVKLLIYYTSSLHSSIPARFSGSGSGTDYTLTISSLQPEDFAVYYCQQYSKLPRTFGGGTKVEIK

SEQ ID NO: 3020 - protein, 107 aa, Artificial Sequence
  source: /note="Description of Artificial Sequence: Synthetic polypeptide"
EIVMTQSPATLSLSPGERATLSCSASQGISNYLNWYQQKPGQAVKLLIYYTSSLHSGIPARFSGSGSGTDYTLTISSLEPEDFAVYYCQQYSKLPRTFGGGTKVEIK

SEQ ID NO: 3021 - protein, 107 aa, Artificial Sequence
  source: /note="Description of Artificial Sequence: Synthetic polypeptide"
EIVMTQSPATLSLSPGERATLSCSASQGISNYLNWYQQKPGQAVKLLIYYTSSLHSGIPARFSGSGSGTDYTLTISRLEPEDFAVYYCQQYSKLPRTFGGGTKVEIK

SEQ ID NO: 3022 - protein, 107 aa, Artificial Sequence
  source: /note="Description of Artificial Sequence: Synthetic polypeptide"
EIVMTQSPATLSLSPGERATLSCSASQGISNYLNWYQQKPGQAVKLLIYYTSSLHSGIPDRFSGSGSGTDYTLTISRLEPEDFAVYYCQQYSKLPRTFGGGTKVEIK

SEQ ID NO: 3023 - protein, 107 aa, Artificial Sequence
  source: /note="Description of Artificial Sequence: Synthetic polypeptide"
EIVMTQSPATLSLSPGERATLSCSASQGISNYLNWYQQKPGLAVKLLIYYTSSLHSGIPDRFSGSGSGTDYTLTISRLEPEDFAVYYCQQYSKLPRTFGGGTKVEIK

SEQ ID NO: 3024 - protein, 107 aa, Artificial Sequence
  source: /note="Description of Artificial Sequence: Synthetic polypeptide"
DIQMIQSPSFLSASVGDRVSIICSASQGISNYLNWYLQKPGKSVKLFIYYTSSLHSGVSSRFSGRGSGTDYTLTIISLKPEDFAAYYCQQYSKLPRTFGGGTKVEIK

SEQ ID NO: 3025 - protein, 107 aa, Artificial Sequence
  source: /note="Description of Artificial Sequence: Synthetic polypeptide"
EIVMTQSPATLSLSPGERATLSCSASQGISNYLNWYQQKPGQAVKLLIYYTSSLHSGIPARFSGSGSGTDYTLTISSLQPEDFAVYYCQQYSKLPRTFGGGTKVEIK

SEQ ID NO: 3026 - protein, 107 aa, Artificial Sequence
  source: /note="Description of Artificial Sequence: Synthetic polypeptide"
EIVMTQSPATLSLSPGERATLSCSASQGISNYLNWYQQKPGQAVKLLIYYTSSLHSGIPARFSGSGPGTDYTLTISSLEPEDFAVYYCQQYSKLPRTFGGGTKVEIK

SEQ ID NO: 3027 - protein, 107 aa, Artificial Sequence
  source: /note="Description of Artificial Sequence: Synthetic polypeptide"
DIVMTQTPLSLSVTPGQPASISCSASQGISNYLNWYLQKPGQSVKLLIYYTSSLHSGVPDRFSGSGSGTDYTLKISRVEAEDVGVYYCQQYSKLPRTFGGGTKVEIK

SEQ ID NO: 3028 - protein, 107 aa, Artificial Sequence
  source: /note="Description of Artificial Sequence: Synthetic polypeptide"
DIVMTQTPLSLSVTPGQPASISCSASQGISNYLNWYLQKPGQPVKLLIYYTSSLHSGVPDRFSGSGSGTDYTLKISRVEAEDVGVYYCQQYSKLPRTFGGGTKVEIK

SEQ ID NO: 3029 - protein, 107 aa, Artificial Sequence
  source: /note="Description of Artificial Sequence: Synthetic polypeptide"
DIVMTQSPAFLSVTPGEKVTITCSASQGISNYLNWYQQKPDQAVKLLIYYTSSLHSGVPSRFSGSGSGTDYTFTISSLEAEDAATYYCQQYSKLPRTFGGGTKVEIK

SEQ ID NO: 3030 - protein, 107 aa, Artificial Sequence
  source: /note="Description of Artificial Sequence: Synthetic polypeptide"
DIVMTQSPLSLPVTPGEPASISCSASQGISNYLNWYLQKPGQSVKLLIYYTSSLHSGVPDRFSGSGSGTDYTLKISRVEAEDVGVYYCQQYSKLPRTFGGGTKVEIK

SEQ ID NO: 3031 - protein, 107 aa, Artificial Sequence
  source: /note="Description of Artificial Sequence: Synthetic polypeptide"
DIVMTQTPLSLPVTPGEPASISCSASQGISNYLNWYLQKPGQSVKLLIYYTSSLHSGVPDRFSGSGSGTDYTLKISRVEAEDVGVYYCQQYSKLPRTFGGGTKVEIK

SEQ ID NO: 3032 - protein, 107 aa, Artificial Sequence
  source: /note="Description of Artificial Sequence: Synthetic polypeptide"
EIVMTQSPATLSVSPGERATLSCSASQGISNYLNWYQQKPGQAVKLLIYYTSSLHSGIPARFSGSGSGTEYTLTISILQSEDFAVYYCQQYSKLPRTFGGGTKVEIK

SEQ ID NO: 3033 - protein, 107 aa, Artificial Sequence
  source: /note="Description of Artificial Sequence: Synthetic polypeptide"
EIVMTQSPATLSVSPGERATLSCSASQGISNYLNWYQQKPGQAVKLLIYYTSSLHSGIPARFSGSGSGTEYTLTISSLQSEDFAVYYCQQYSKLPRTFGGGTKVEIK

SEQ ID NO: 3034 - protein, 107 aa, Artificial Sequence
  source: /note="Description of Artificial Sequence: Synthetic polypeptide"
DIVMTQSPLSLPVTLGQPASISCSASQGISNYLNWYQQRPGQSVKRLIYYTSSLHSGVPDRFSGSGSGTDYTLKISRVEAEDVGVYYCQQYSKLPRTFGGGTKVEIK

SEQ ID NO: 3035 - protein, 107 aa, Artificial Sequence
  source: /note="Description of Artificial Sequence: Synthetic polypeptide"
EITMTQSPAFMSATPGDKVNISCSASQGISNYLNWYQQKPGEAVKFIIYYTSSLHSGIPPRFSGSGYGTDYTLTINNIESEDAAYYYCQQYSKLPRTFGGGTKVEIK

SEQ ID NO: 3036 - protein, 107 aa, Artificial Sequence
  source: /note="Description of Artificial Sequence: Synthetic polypeptide"
DIVMTQTPLSSPVTLGQPASISCSASQGISNYLNWYQQRPGQPVKLLIYYTSSLHSGVPDRFSGSGAGTDYTLKISRVEAEDVGVYYCQQYSKLPRTFGGGTKVEIK

SEQ ID NO: 3037 - protein, 107 aa, Artificial Sequence
  source: /note="Description of Artificial Sequence: Synthetic polypeptide"
EIVMTQSPDFQSVTPKEKVTITCSASQGISNYLNWYQQKPDQSVKLLIYYTSSLHSGVPSRFSGSGSGTDYTLTINSLEAEDAATYYCQQYSKLPRTFGGGTKVEIK

SEQ ID NO: 3038 - protein, 107 aa, Artificial Sequence
  source: /note="Description of Artificial Sequence: Synthetic polypeptide"
EIVMTQTPLSLSITPGEQASISCSASQGISNYLNWYLQKARPVVKLLIYYTSSLHSGVPDRFSGSGSGTDYTLKISRVEAEDFGVYYCQQYSKLPRTFGGGTKVEIK

SEQ ID NO: 3039 - protein, 107 aa, Artificial Sequence
  source: /note="Description of Artificial Sequence: Synthetic polypeptide"
EIVMTQTPLSLSITPGEQASMSCSASQGISNYLNWYLQKARPVVKLLIYYTSSLHSGVPDRFSGSGSGTDYTLKISRVEAEDFGVYYCQQYSKLPRTFGGGTKVEIK

SEQ ID NO: 3040 - protein, 120 aa, Artificial Sequence
  source: /note="Description of Artificial Sequence: Synthetic polypeptide"
QVTLKESGPVLVKPTETLTLTCTVSGFSLTAYGVNWVRQPPGKALEWLGMIWGDGNTDYNSALKSRLTISKDNSKSQVVLTMTNMDPVDTATYYCARDRVTATLYAMDYWGQGTLVTVSS

SEQ ID NO: 3041 - protein, 120 aa, Artificial Sequence
  source: /note="Description of Artificial Sequence: Synthetic polypeptide"
QVTLKESGPALVKPTETLTLTCTVSGFSLTAYGVNWVRQPPGKALEWLGMIWGDGNTDYNSALKSRLIISKDNSKSQVVLTMTNMDPVDTATYYCARDRVTATLYAMDYWGQGTLVTVSS

SEQ ID NO: 3042 - protein, 120 aa, Artificial Sequence
  source: /note="Description of Artificial Sequence: Synthetic polypeptide"
QVTLKESGPALVKPTQTLTLTCTVSGFSLTAYGVNWVRQPPGKALEWLGMIWGDGNTDYNSALKSRLTISKDNSKSQVVLTMTNMDPVDTATYYCARDRVTATLYAMDYWGQGTLVTVSS

SEQ ID NO: 3043 - protein, 120 aa, Artificial Sequence
  source: /note="Description of Artificial Sequence: Synthetic polypeptide"
QVQLQESGPGLVKPSGTLSLTCAVSGFSLTAYGVNWVRQPPGKGLEWLGMIWGDGNTDYNSALKSRLTISKDNSKSQVSLKLSSVTAADTAVYYCARDRVTATLYAMDYWGQGTLVTVSS

SEQ ID NO: 3044 - protein, 120 aa, Artificial Sequence
  source: /note="Description of Artificial Sequence: Synthetic polypeptide"
QVTLKESGPTLVKPTQTLTLTCTVSGFSLTAYGVNWVRQPPGKALEWLGMIWGDGNTDYNSALKSRLTITKDNSKSQVVLTMTNMDPVDTATYYCARDRVTATLYAMDYWGQGTLVTVSS

SEQ ID NO: 3045 - protein, 120 aa, Artificial Sequence
  source: /note="Description of Artificial Sequence: Synthetic polypeptide"
QVTLKESGPALVKPTQTLTLTCTVSGFSLTAYGVNWVRQPPGKALEWLGMIWGDGNTDYNSALKSRLTITKDNSKSQVVLTMTNMDPVDTATYYCARDRVTATLYAMDYWGQGTLVTVSS

SEQ ID NO: 3046 - protein, 120 aa, Artificial Sequence
  source: /note="Description of Artificial Sequence: Synthetic polypeptide"
QVQLQESGPGLVKPSQTLSLTCTVSGFSLTAYGVNWVRQPPGKGLEWLGMIWGDGNTDYNSALKSRLTISKDNSKSQVSLKLSSVTAADTAVYYCARDRVTATLYAMDYWGQGTLVTVSS

SEQ ID NO: 3047 - protein, 120 aa, Artificial Sequence
  source: /note="Description of Artificial Sequence: Synthetic polypeptide"
QVQLQESGPGLVKPSETLSLTCTVSGFSLTAYGVNWVRQPPGKGLEWLGMIWGDGNTDYNSALKSRLTISKDNSKSQVSLKLSSVTAADTAVYYCARDRVTATLYAMDYWGQGTLVTVSS

SEQ ID NO: 3048 - protein, 120 aa, Artificial Sequence
  source: /note="Description of Artificial Sequence: Synthetic polypeptide"
QVQLQESGPGLVKPSQTLSLTCAVSGFSLTAYGVNWVRQPPGKGLEWLGMIWGDGNTDYNSALKSRLTISKDNSKSQVSLKLSSVTAADTAVYYCARDRVTATLYAMDYWGQGTLVTVSS

SEQ ID NO: 3049 - protein, 120 aa, Artificial Sequence
  source: /note="Description of Artificial Sequence: Synthetic polypeptide"
QVQLQESGPGLVKPSDTLSLTCTVSGFSLTAYGVNWVRQPPGKGLEWLGMIWGDGNTDYNSALKSRLTISKDNSKSQVSLKLSSVTAADTAVYYCARDRVTATLYAMDYWGQGTLVTVSS

SEQ ID NO: 3050 - protein, 120 aa, Artificial Sequence
  source: /note="Description of Artificial Sequence: Synthetic polypeptide"
QVQLQESGPGLVKPSQTLSLTCTVSGFSLTAYGVNWVRQHPGKGLEWLGMIWGDGNTDYNSALKSRLTISKDNSKSQVSLKLSSVTAADTAVYYCARDRVTATLYAMDYWGQGTLVTVSS

SEQ ID NO: 3051 - protein, 120 aa, Artificial Sequence
  source: /note="Description of Artificial Sequence: Synthetic polypeptide"
QVQLQESGPGLVKPSQTLSLTCTVSGFSLTAYGVNWVRQPAGKGLEWLGMIWGDGNTDYNSALKSRLTISKDNSKSQVSLKLSSVTAADTAVYYCARDRVTATLYAMDYWGQGTLVTVSS

SEQ ID NO: 3052 - protein, 120 aa, Artificial Sequence
  source: /note="Description of Artificial Sequence: Synthetic polypeptide"
QVQLQESGPGLVKPSQTLSLTCAVSGFSLTAYGVNWVRQPPGKGLEWLGMIWGDGNTDYNSALKSRLTISKDNSKSQVSLKLSSVTAVDTAVYYCARDRVTATLYAMDYWGQGTLVTVSS

SEQ ID NO: 3053 - protein, 120 aa, Artificial Sequence
  source: /note="Description of Artificial Sequence: Synthetic polypeptide"
QVQLQESGPGLVKPSETLSLTCTVSGFSLTAYGVNWVRQPPGKGLEWLGMIWGDGNTDYNSALKSRLTISKDNSKSHVSLKLSSVTAADTAVYYCARDRVTATLYAMDYWGQGTLVTVSS

SEQ ID NO: 3054 - protein, 120 aa, Artificial Sequence
  source: /note="Description of Artificial Sequence: Synthetic polypeptide"
QVQLQESGPGLVKPSETLSLTCAVSGFSLTAYGVNWVRQPPGKGLEWLGMIWGDGNTDYNSALKSRLTISKDNSKSQVSLKLSSVTAADTAVYYCARDRVTATLYAMDYWGQGTLVTVSS

SEQ ID NO: 3055 - protein, 120 aa, Artificial Sequence
  source: /note="Description of Artificial Sequence: Synthetic polypeptide"
QVQLQESGPGLVKPSQTLSLTCAVYGFSLTAYGVNWVRQPPGKGLEWLGMIWGDGNTDYNSALKSRLTISKDNSKSQVSLKLSSVTAADTAVYYCARDRVTATLYAMDYWGQGTLVTVSS

SEQ ID NO: 3056 - protein, 120 aa, Artificial Sequence
  source: /note="Description of Artificial Sequence: Synthetic polypeptide"
RVQLQESGPGLVKPSETLSLTCTVSGFSLTAYGVNWVRQPPGKGLEWLGMIWGDGNTDYNSALKSRLTISKDNSKSQVPLKLSSVTAADTAVYYCARDRVTATLYAMDYWGQGTLVTVSS

SEQ ID NO: 3057 - protein, 120 aa, Artificial Sequence
  source: /note="Description of Artificial Sequence: Synthetic polypeptide"
QVQLQESGPGLVKPSQTLSLTCTVSGFSLTAYGVNWVRQHPGKGLEWLGMIWGDGNTDYNSALKSLLTISKDNSKSQVSLKLSSVTAADTAVYYCARDRVTATLYAMDYWGQGTLVTVSS

SEQ ID NO: 3058 - protein, 120 aa, Artificial Sequence
  source: /note="Description of Artificial Sequence: Synthetic polypeptide"
QVQLQESGPGLVKPSDTLSLTCAVSGFSLTAYGVNWVRQPPGKGLEWLGMIWGDGNTDYNSALKSRLTISKDNSKSQVSLKLSSVTALDTAVYYCARDRVTATLYAMDYWGQGTLVTVSS

SEQ ID NO: 3059 - protein, 120 aa, Artificial Sequence
  source: /note="Description of Artificial Sequence: Synthetic polypeptide"
QVQLQESGPGLVKPSDTLSLTCAVSGFSLTAYGVNWVRQPPGKGLEWLGMIWGDGNTDYNSALKSRLTISKDNSKSQVSLKLSSVTAVDTAVYYCARDRVTATLYAMDYWGQGTLVTVSS

SEQ ID NO: 3060 - protein, 120 aa, Artificial Sequence
  source: /note="Description of Artificial Sequence: Synthetic polypeptide"
QVQLQESGSGLVKPSQTLSLTCAVSGFSLTAYGVNWVRQPPGKGLEWLGMIWGDGNTDYNSALKSRLTISKDNSKSQVSLKLSSVTAADTAVYYCARDRVTATLYAMDYWGQGTLVTVSS

SEQ ID NO: 3061 - protein, 120 aa, Artificial Sequence
  source: /note="Description of Artificial Sequence: Synthetic polypeptide"
EVQLVESGGGLVQPGRSLRLSCTVSGFSLTAYGVNWVRQAPGKGLEWLGMIWGDGNTDYNSALKSRLTISKDNSKSIVYLQMNSLKTEDTAVYYCARDRVTATLYAMDYWGQGTLVTVSS

SEQ ID NO: 3062 - protein, 120 aa, Artificial Sequence
  source: /note="Description of Artificial Sequence: Synthetic polypeptide"
EVQLVESGGGLVQPGPSLRLSCTVSGFSLTAYGVNWVRQAPGKGLEWLGMIWGDGNTDYNSALKSRLTISKDNSKSIVYLQMNSLKTEDTAVYYCARDRVTATLYAMDYWGQGTLVTVSS

SEQ ID NO: 3063 - protein, 120 aa, Artificial Sequence
  source: /note="Description of Artificial Sequence: Synthetic polypeptide"
QVQLQESGSGLVKPSQTLSLTCAVSGFSLTAYGVNWVRQSPGKGLEWLGMIWGDGNTDYNSALKSRLTISKDNSKSQVSLKLSSVTAADTAVYYCARDRVTATLYAMDYWGQGTLVTVSS

SEQ ID NO: 3064 - protein, 120 aa, Artificial Sequence
  source: /note="Description of Artificial Sequence: Synthetic polypeptide"
QVQLQESGPGLVKPSETLSLTCTVSGFSLTAYGVNWVRQPAGKGLEWLGMIWGDGNTDYNSALKSRLTISKDNSKSQVSLKLSSVTAADTAVYYCARDRVTATLYAMDYWGQGTLVTVSS

SEQ ID NO: 3065 - protein, 120 aa, Artificial Sequence
  source: /note="Description of Artificial Sequence: Synthetic polypeptide"
EVQLVESGGGLVKPGRSLRLSCTVSGFSLTAYGVNWVRQAPGKGLEWLGMIWGDGNTDYNSALKSRLTISKDNSKSIVYLQMNSLKTEDTAVYYCARDRVTATLYAMDYWGQGTLVTVSS

SEQ ID NO: 3066 - protein, 120 aa, Artificial Sequence
  source: /note="Description of Artificial Sequence: Synthetic polypeptide"
QVQLQESGPGLVKPSETLSLTCAVYGFSLTAYGVNWVRQPPGKGLEWLGMIWGDGNTDYNSALKSRLTISKDNSKSQVYLKLSSVTAADTAVYYCARDRVTATLYAMDYWGQGTLVTVSS

SEQ ID NO: 3067 - protein, 120 aa, Artificial Sequence
  source: /note="Description of Artificial Sequence: Synthetic polypeptide"
QVQLQESGPGLVKPSDTLSLTCAVSGFSLTAYGVNWVRQPPGKGLEWLGMIWGDGNTDYNSALKSRLTISKDNSKSQVSLKLSSVTAVDTGVYYCARDRVTATLYAMDYWGQGTLVTVSS

SEQ ID NO: 3068 - protein, 120 aa, Artificial Sequence
  source: /note="Description of Artificial Sequence: Synthetic polypeptide"
EVQLVESGGGLVQPGGSLRLSCAVSGFSLTAYGVNWVRQAPGKGLEWLGMIWGDGNTDYNSALKSRLTISKDNSKSSVYLQMNSLKTEDTAVYYCARDRVTATLYAMDYWGQGTLVTVSS

SEQ ID NO: 3069 - protein, 120 aa, Artificial Sequence
  source: /note="Description of Artificial Sequence: Synthetic polypeptide"
EVQLVESGGGLVKPGGSLRLSCAVSGFSLTAYGVNWVRQAPGKGLEWLGMIWGDGNTDYNSALKSRLTISKDNSKSTVYLQMNSLKTEDTAVYYCARDRVTATLYAMDYWGQGTLVTVSS

SEQ ID NO: 3070 - protein, 120 aa, Artificial Sequence
  source: /note="Description of Artificial Sequence: Synthetic polypeptide"
QVQLQQSGPGLVKPSQTLSLTCAVSGFSLTAYGVNWVRQSPSRGLEWLGMIWGDGNTDYNSALKSRLTINKDNSKSQVSLQLNSVTPEDTAVYYCARDRVTATLYAMDYWGQGTLVTVSS

SEQ ID NO: 3071 - protein, 120 aa, Artificial Sequence
  source: /note="Description of Artificial Sequence: Synthetic polypeptide"
QVQLVESGGGLVQPGGSLRLSCSVSGFSLTAYGVNWVRQAPGKGLEWLGMIWGDGNTDYNSALKSRLTISKDNSKSTVYLQMNSLRAEDTAVYYCARDRVTATLYAMDYWGQGTLVTVSS

SEQ ID NO: 3072 - protein, 120 aa, Artificial Sequence
  source: /note="Description of Artificial Sequence: Synthetic polypeptide"
QVQLQQWGAGLLKPSETLSLTCAVYGFSLTAYGVNWVRQPPGKGLEWLGMIWGDGNTDYNSALKSRLTISKDNSKSQVSLKLSSVTAADTAVYYCARDRVTATLYAMDYWGQGTLVTVSS

SEQ ID NO: 3073 - protein, 120 aa, Artificial Sequence
  source: /note="Description of Artificial Sequence: Synthetic polypeptide"
QVQLVESGGGVVQPGRSLRLSCAVSGFSLTAYGVNWVRQAPGKGLEWLGMIWGDGNTDYNSALKSRLTISKDNSTSTVFLQMNSLRAEDTAVYYCARDRVTATLYAMDYWGQGTLVTVSS

SEQ ID NO: 3074 - protein, 120 aa, Artificial Sequence
  source: /note="Description of Artificial Sequence: Synthetic polypeptide"
EVQLVESGGGLVQPGGSLRLSCAVSGFSLTAYGVNWVRQAPGKGLEWLGMIWGDGNTDYNSALKSRLTISKDNSKSTVYLQMNSLRAEDTAVYYCARDRVTATLYAMDYWGQGTLVTVSS

SEQ ID NO: 3075 - protein, 120 aa, Artificial Sequence
  source: /note="Description of Artificial Sequence: Synthetic polypeptide"
EVQLVESGGGLVQPGGSLRLSCAVSGFSLTAYGVNWVRQAPGKGLEWLGMIWGDGNTDYNSALKSRLTISKDNAKSSVYLQMNSLRDEDTAVYYCARDRVTATLYAMDYWGQGTLVTVSS

SEQ ID NO: 3076 - protein, 120 aa, Artificial Sequence
  source: /note="Description of Artificial Sequence: Synthetic polypeptide"
EVQLLESGGGLVQPGGSLRLSCAVSGFSLTAYGVNWVRQAPGKGLEWLGMIWGDGNTDYNSALKSRLTISKDNSKSTVYLQMNSLRAEDTAVYYCARDRVTATLYAMDYWGQGTLVTVSS

SEQ ID NO: 3077 - protein, 120 aa, Artificial Sequence
  source: /note="Description of Artificial Sequence: Synthetic polypeptide"
QVQLVESGGGLVKPGGSLRLSCAVSGFSLTAYGVNWVRQAPGKGLEWLGMIWGDGNTDYNSALKSRLTISKDNAKSSVYLQMNSLRAEDTAVYYCARDRVTATLYAMDYWGQGTLVTVSS

SEQ ID NO: 3078 - protein, 120 aa, Artificial Sequence
  source: /note="Description of Artificial Sequence: Synthetic polypeptide"
EVQLVESGGGLVQPGGSLKLSCAVSGFSLTAYGVNWVRQASGKGLEWLGMIWGDGNTDYNSALKSRLTISKDNSKSTVYLQMNSLKTEDTAVYYCARDRVTATLYAMDYWGQGTLVTVSS

SEQ ID NO: 3079 - protein, 120 aa, Artificial Sequence
  source: /note="Description of Artificial Sequence: Synthetic polypeptide"
QVQLLESGGGLVKPGGSLRLSCAVSGFSLTAYGVNWVRQAPGKGLEWLGMIWGDGNTDYNSALKSRLTISKDNAKSSVYLQMNSLRAEDTAVYYCARDRVTATLYAMDYWGQGTLVTVSS

SEQ ID NO: 3080 - protein, 120 aa, Artificial Sequence
  source: /note="Description of Artificial Sequence: Synthetic polypeptide"
QVQLVESGGGVVQPGRSLRLSCAVSGFSLTAYGVNWVRQAPGKGLEWLGMIWGDGNTDYNSALKSRLTISKDNSKSTVYLQMNSLRAEDTAVYYCARDRVTATLYAMDYWGQGTLVTVSS

SEQ ID NO: 3081 - protein, 120 aa, Artificial Sequence
  source: /note="Description of Artificial Sequence: Synthetic polypeptide"
QVQLVESGGGVVQPGRSLRLSCAVSGFSLTAYGVNWVRQAPGKGLEWLGMIWGDGNTDYNSALKSRLTISKDNSKSRVYLQMNSLRAEDTAVYYCARDRVTATLYAMDYWGQGTLVTVSS

SEQ ID NO: 3082 - protein, 120 aa, Artificial Sequence
  source: /note="Description of Artificial Sequence: Synthetic polypeptide"
QVQLVESGGGVVQPGRSLRLSCAVSGFSLTAYGVNWVRQAPGKGLEWLGMIWGDGNTDYNSALKSRLAISKDNSKSTVYLQMNSLRAEDTAVYYCARDRVTATLYAMDYWGQGTLVTVSS

SEQ ID NO: 3083 - protein, 120 aa, Artificial Sequence
  source: /note="Description of Artificial Sequence: Synthetic polypeptide"
QVQLVESGGGVVQPGGSLRLSCAVSGFSLTAYGVNWVRQAPGKGLEWLGMIWGDGNTDYNSALKSRLTISKDNSKSTVYLQMNSLRAEDTAVYYCARDRVTATLYAMDYWGQGTLVTVSS

SEQ ID NO: 3084 - protein, 120 aa, Artificial Sequence
  source: /note="Description of Artificial Sequence: Synthetic polypeptide"
EVQLVESGGGLVQPGGSLRLSCAVSGFSLTAYGVNWVRQAPGKGLEWLGMIWGDGNTDYNSALKSRLTISKDNAKSTVYLQMNSLRAEDTAVYYCARDRVTATLYAMDYWGQGTLVTVSS

SEQ ID NO: 3085 - protein, 120 aa, Artificial Sequence
  source: /note="Description of Artificial Sequence: Synthetic polypeptide"
EVQLVESGGGLVQPGGSLRLSCAVSGFSLTAYGVNWVRQAPGKGLEWLGMIWGDGNTDYNSALKSRLTISKDNAKSSVYLQMNSLRAEDTAVYYCARDRVTATLYAMDYWGQGTLVTVSS

SEQ ID NO: 3086 - protein, 120 aa, Artificial Sequence
  source: /note="Description of Artificial Sequence: Synthetic polypeptide"
EVQLVESGGVVVQPGGSLRLSCAVSGFSLTAYGVNWVRQAPGKGLEWLGMIWGDGNTDYNSALKSRLTISKDNSKSSVYLQMNSLRTEDTALYYCARDRVTATLYAMDYWGQGTLVTVSS

SEQ ID NO: 3087 - protein, 120 aa, Artificial Sequence
  source: /note="Description of Artificial Sequence: Synthetic polypeptide"
EVQLVESGGGLVQPGGSLRLSCAVSGFSLTAYGVNWVRQAPGKGLEWLGMIWGDGNTDYNSALKSRLTISKHNSKSTVYLQMNSLRAEDTAVYYCARDRVTATLYAMDYWGQGTLVTVSS

SEQ ID NO: 3088 - protein, 120 aa, Artificial Sequence
  source: /note="Description of Artificial Sequence: Synthetic polypeptide"
EVQLVESGGGLVKPGGSLRLSCAVSGFSLTAYGVNWVRQAPGKGLEWLGMIWGDGNTDYNSALKSRLTISKDNAKSSVYLQMNSLRAEDTAVYYCARDRVTATLYAMDYWGQGTLVTVSS

SEQ ID NO: 3089 - protein, 120 aa, Artificial Sequence
  source: /note="Description of Artificial Sequence: Synthetic polypeptide"
EVQLVESGGGLIQPGGSLRLSCAVSGFSLTAYGVNWVRQPPGKGLEWLGMIWGDGNTDYNSALKSRLTISKDNSKSTVYLQMNSLRAEDTAVYYCARDRVTATLYAMDYWGQGTLVTVSS

SEQ ID NO: 3090 - skipped

SEQ ID NO: 3091 - protein, 119 aa, Artificial Sequence
  source: /note="Description of Artificial Sequence: Synthetic polypeptide"
QVQLQQSGPELVKPGASVKISCKASGYAFSSSWMNWVKQRPGQGLEWIGRIYPGDGDTKYNGKFKGKATLTADKSSSTAYMHLSSLTSVDSAVYFCARRGTGGWYFDVWGAGTTVTVSS

SEQ ID NO: 3092 - protein, 111 aa, Artificial Sequence
  source: /note="Description of Artificial Sequence: Synthetic polypeptide"
DIVLTQSPASLAVSLGQRATISCRASESVDSSGNSFMHWYQQKPGQPPQLLIYRASNLESGIPARFSGSGSRTDFTLTINPVEADDVATFYCQQSFDDPFTFGSGTKLEIK

SEQ ID NO: 3093 - protein, 111 aa, Artificial Sequence
  source: /note="Description of Artificial Sequence: Synthetic polypeptide"
DIVLTQSPDSLAVSLGERATINCRASESVDSSGNSFMHWYQQKPGQPPQLLIYRASNLESGVPDRFSGSGSRTDFTLTISSLQAEDVAVYYCQQSFDDPFTFGQGTKLEIK

SEQ ID NO: 3094 - protein, 111 aa, Artificial Sequence
  source: /note="Description of Artificial Sequence: Synthetic polypeptide"
EIVLTQSPATLSLSPGERATLSCRASESVDSSGNSFMHWYQQKPGQAPQLLIYRASNLESGIPARFSGSGSRTDFTLTISSLEPEDFAVYYCQQSFDDPFTFGQGTKLEIK

SEQ ID NO: 3095 - protein, 111 aa, Artificial Sequence
  source: /note="Description of Artificial Sequence: Synthetic polypeptide"
EIVLTQSPATLSLSPGERATLSCRASESVDSSGNSFMHWYQQKPGQAPQLLIYRASNLESGIPARFSGSGSRTDFTLTISRLEPEDFAVYYCQQSFDDPFTFGQGTKLEIK

SEQ ID NO: 3096 - protein, 111 aa, Artificial Sequence
  source: /note="Description of Artificial Sequence: Synthetic polypeptide"
EIVLTQSPATLSLSPGERATLSCRASESVDSSGNSFMHWYQQKPGQAPQLLIYRASNLESGIPARFSGSGSRTDFTLTISSLQPEDFAVYYCQQSFDDPFTFGQGTKLEIK

SEQ ID NO: 3097 - protein, 111 aa, Artificial Sequence
  source: /note="Description of Artificial Sequence: Synthetic polypeptide"
DIQLTQSPSSLSASVGDRVTITCRASESVDSSGNSFMHWYQQKPGQAPQLLIYRASNLESGVPSRFSGSGSRTDFTLTISSLQPEDVATYYCQQSFDDPFTFGQGTKLEIK

SEQ ID NO: 3098 - protein, 111 aa, Artificial Sequence
  source: /note="Description of Artificial Sequence: Synthetic polypeptide"
EIVLTQSPATLSLSPGERATLSCRASESVDSSGNSFMHWYQQKPGQAPQLLIYRASNLESGIPARFSGSGPRTDFTLTISSLEPEDFAVYYCQQSFDDPFTFGQGTKLEIK

SEQ ID NO: 3099 - protein, 111 aa, Artificial Sequence
  source: /note="Description of Artificial Sequence: Synthetic polypeptide"
EIVLTQSPATLSLSPGERATLSCRASESVDSSGNSFMHWYQQKPGQAPQLLIYRASNLESGIPDRFSGSGSRTDFTLTISRLEPEDFAVYYCQQSFDDPFTFGQGTKLEIK

SEQ ID NO: 3100 - protein, 111 aa, Artificial Sequence
  source: /note="Description of Artificial Sequence: Synthetic polypeptide"
DIQLTQSPSSLSASVGDRVTITCRASESVDSSGNSFMHWYQQKPGKVPQLLIYRASNLESGVPSRFSGSGSRTDFTLTISSLQPEDVATYYCQQSFDDPFTFGQGTKLEIK

SEQ ID NO: 3101 - protein, 111 aa, Artificial Sequence
  source: /note="Description of Artificial Sequence: Synthetic polypeptide"
DIQLTQSPSSLSASVGDRVTITCRASESVDSSGNSFMHWYQQKPGKTPQLLIYRASNLESGIPSRFSGSGSRTDFTLTIRSLQPEDFATYYCQQSFDDPFTFGQGTKLEIK

SEQ ID NO: 3102 - protein, 111 aa, Artificial Sequence
  source: /note="Description of Artificial Sequence: Synthetic polypeptide"
EIVLTQSPGTLSLSPGERATLSCRASESVDSSGNSFMHWYQQKPGQAPQLLIYRASNLESGIPDRFSGSGSRTDFTLTISRLEPEDFAVYYCQQSFDDPFTFGQGTKLEIK

SEQ ID NO: 3103 - protein, 111 aa, Artificial Sequence
  source: /note="Description of Artificial Sequence: Synthetic polypeptide"
EIVLTQSPATLSLSPGERATLSCRASESVDSSGNSFMHWYQQKPGLAPQLLIYRASNLESGIPDRFSGSGSRTDFTLTISRLEPEDFAVYYCQQSFDDPFTFGQGTKLEIK

SEQ ID NO: 3104 - protein, 111 aa, Artificial Sequence
  source: /note="Description of Artificial Sequence: Synthetic polypeptide"
DIQLTQSPSSLSASVGDRVTITCRASESVDSSGNSFMHWYQQKPGKAPQLLIYRASNLESGVPSRFSGSGSRTDFTLTISSLQPEDFATYYCQQSFDDPFTFGQGTKLEIK

SEQ ID NO: 3105 - protein, 111 aa, Artificial Sequence
  source: /note="Description of Artificial Sequence: Synthetic polypeptide"
DIQLTQSPSSVSASVGDRVTITCRASESVDSSGNSFMHWYQQKPGKAPQLLIYRASNLESGVPSRFSGSGSRTDFTLTISSLQPEDFATYYCQQSFDDPFTFGQGTKLEIK

SEQ ID NO: 3106 - protein, 111 aa, Artificial Sequence
  source: /note="Description of Artificial Sequence: Synthetic polypeptide"
AIQLTQSPSSLSASVGDRVTITCRASESVDSSGNSFMHWYQQKPGKAPQLLIYRASNLESGVPSRFSGSGSRTDFTLTISSLQPEDFATYYCQQSFDDPFTFGQGTKLEIK

SEQ ID NO: 3107 - protein, 111 aa, Artificial Sequence
  source: /note="Description of Artificial Sequence: Synthetic polypeptide"
DIQLTQSPSFLSASVGDRVTITCRASESVDSSGNSFMHWYQQKPGKAPQLLIYRASNLESGVPSRFSGSGSRTEFTLTISSLQPEDFATYYCQQSFDDPFTFGQGTKLEIK

SEQ ID NO: 3108 - protein, 111 aa, Artificial Sequence
  source: /note="Description of Artificial Sequence: Synthetic polypeptide"
DIQLTQSPSSLSASVGDRVTITCRASESVDSSGNSFMHWYQQKPGKAPQLLIYRASNLESGVPSRFSGSGSRTDFTFTISSLQPEDIATYYCQQSFDDPFTFGQGTKLEIK

SEQ ID NO: 3109 - protein, 111 aa, Artificial Sequence
  source: /note="Description of Artificial Sequence: Synthetic polypeptide"
EIVLTQSPATLSVSPGERATLSCRASESVDSSGNSFMHWYQQKPGQAPQLLIYRASNLESGIPARFSGSGSRTEFTLTISILQSEDFAVYYCQQSFDDPFTFGQGTKLEIK

SEQ ID NO: 3110 - protein, 111 aa, Artificial Sequence
  source: /note="Description of Artificial Sequence: Synthetic polypeptide"
EIVLTQSPATLSVSPGERATLSCRASESVDSSGNSFMHWYQQKPGQAPQLLIYRASNLESGIPARFSGSGSRTEFTLTISSLQSEDFAVYYCQQSFDDPFTFGQGTKLEIK

SEQ ID NO: 3111 - protein, 111 aa, Artificial Sequence
  source: /note="Description of Artificial Sequence: Synthetic polypeptide"
AIRLTQSPFSLSASVGDRVTITCRASESVDSSGNSFMHWYQQKPAKAPQLFIYRASNLESGVPSRFSGSGSRTDFTLTISSLQPEDFATYYCQQSFDDPFTFGQGTKLEIK

SEQ ID NO: 3112 - protein, 111 aa, Artificial Sequence
  source: /note="Description of Artificial Sequence: Synthetic polypeptide"
DIQLTQSPSSLSASVGDRVTITCRASESVDSSGNSFMHWYQQKPGKAPQSLIYRASNLESGVPSRFSGSGSRTDFTLTISSLQPEDFATYYCQQSFDDPFTFGQGTKLEIK

SEQ ID NO: 3113 - protein, 111 aa, Artificial Sequence
  source: /note="Description of Artificial Sequence: Synthetic polypeptide"
DIQLTQSPSSLSASVGDRVTITCRASESVDSSGNSFMHWYQQKPGKAPQRLIYRASNLESGVPSRFSGSGSRTEFTLTISNLQPEDFATYYCQQSFDDPFTFGQGTKLEIK

SEQ ID NO: 3114 - protein, 111 aa, Artificial Sequence
  source: /note="Description of Artificial Sequence: Synthetic polypeptide"
DIQLTQSPSTLSASVGDRVTITCRASESVDSSGNSFMHWYQQKPGKAPQLLIYRASNLESGVPSRFSGSGSRTEFTLTISSLQPDDFATYYCQQSFDDPFTFGQGTKLEIK

SEQ ID NO: 3115 - protein, 111 aa, Artificial Sequence
  source: /note="Description of Artificial Sequence: Synthetic polypeptide"
EIVLTQSPDFQSVTPKEKVTITCRASESVDSSGNSFMHWYQQKPDQSPQLLIYRASNLESGVPSRFSGSGSRTDFTLTINSLEAEDAATYYCQQSFDDPFTFGQGTKLEIK

SEQ ID NO: 3116 - protein, 111 aa, Artificial Sequence
  source: /note="Description of Artificial Sequence: Synthetic polypeptide"
DIQLTQSPSSLSASVGDRVTITCRASESVDSSGNSFMHWYQQKPGKAPQSLIYRASNLESGVPSKFSGSGSRTDFTLTISSLQPEDFATYYCQQSFDDPFTFGQGTKLEIK

SEQ ID NO: 3117 - protein, 111 aa, Artificial Sequence
  source: /note="Description of Artificial Sequence: Synthetic polypeptide"
DIQLTQSPSSLSASVGDRVTITCRASESVDSSGNSFMHWYQQKPGKAPQRLIYRASNLESGVPSRFSGSGSRTEFTLTISSLQPEDFATYYCQQSFDDPFTFGQGTKLEIK

SEQ ID NO: 3118 - protein, 111 aa, Artificial Sequence
  source: /note="Description of Artificial Sequence: Synthetic polypeptide"
DIVLTQTPLSLSVTPGQPASISCRASESVDSSGNSFMHWYLQKPGQPPQLLIYRASNLESGVPDRFSGSGSRTDFTLKISRVEAEDVGVYYCQQSFDDPFTFGQGTKLEIK

SEQ ID NO: 3119 - protein, 111 aa, Artificial Sequence
  source: /note="Description of Artificial Sequence: Synthetic polypeptide"
DIQLTQSPSSLSASVGDRVTITCRASESVDSSGNSFMHWYQQKPEKAPQSLIYRASNLESGVPSRFSGSGSRTDFTLTISSLQPEDFATYYCQQSFDDPFTFGQGTKLEIK

SEQ ID NO: 3120 - protein, 111 aa, Artificial Sequence
  source: /note="Description of Artificial Sequence: Synthetic polypeptide"
EIVLTQSPPTLSLSPGERVTLSCRASESVDSSGNSFMHWYQQKPGQAPQLLIYRASNLESGIPARFSGSGSRTDFTLTISSLQPEDFAVYYCQQSFDDPFTFGQGTKLEIK

SEQ ID NO: 3121 - protein, 111 aa, Artificial Sequence
  source: /note="Description of Artificial Sequence: Synthetic polypeptide"
DIQLTQSPSAMSASVGDRVTITCRASESVDSSGNSFMHWYQQKPGKVPQRLIYRASNLESGVPSRFSGSGSRTEFTLTISSLQPEDFATYYCQQSFDDPFTFGQGTKLEIK

SEQ ID NO: 3122 - protein, 111 aa, Artificial Sequence
  source: /note="Description of Artificial Sequence: Synthetic polypeptide"
DIVLTQSPLSLPVTPGEPASISCRASESVDSSGNSFMHWYLQKPGQSPQLLIYRASNLESGVPDRFSGSGSRTDFTLKISRVEAEDVGVYYCQQSFDDPFTFGQGTKLEIK

SEQ ID NO: 3123 - protein, 111 aa, Artificial Sequence
  source: /note="Description of Artificial Sequence: Synthetic polypeptide"
DIVLTQTPLSLPVTPGEPASISCRASESVDSSGNSFMHWYLQKPGQSPQLLIYRASNLESGVPDRFSGSGSRTDFTLKISRVEAEDVGVYYCQQSFDDPFTFGQGTKLEIK

SEQ ID NO: 3124 - protein, 111 aa, Artificial Sequence
  source: /note="Description of Artificial Sequence: Synthetic polypeptide"
DIVLTQTPLSLSVTPGQPASISCRASESVDSSGNSFMHWYLQKPGQSPQLLIYRASNLESGVPDRFSGSGSRTDFTLKISRVEAEDVGVYYCQQSFDDPFTFGQGTKLEIK

SEQ ID NO: 3125 - protein, 111 aa, Artificial Sequence
  source: /note="Description of Artificial Sequence: Synthetic polypeptide"
EIVLTQSPPTLSLSPGERVTLSCRASESVDSSGNSFMHWYQQKPGQAPQLLIYRASNLESSIPARFSGSGSRTDFTLTISSLQPEDFAVYYCQQSFDDPFTFGQGTKLEIK

SEQ ID NO: 3126 - protein, 111 aa, Artificial Sequence
  source: /note="Description of Artificial Sequence: Synthetic polypeptide"
DIVLTQSPLSLPVTLGQPASISCRASESVDSSGNSFMHWYQQRPGQSPQRLIYRASNLESGVPDRFSGSGSRTDFTLKISRVEAEDVGVYYCQQSFDDPFTFGQGTKLEIK

SEQ ID NO: 3127 - protein, 111 aa, Artificial Sequence
  source: /note="Description of Artificial Sequence: Synthetic polypeptide"
DIVLTQTPLSSPVTLGQPASISCRASESVDSSGNSFMHWYQQRPGQPPQLLIYRASNLESGVPDRFSGSGARTDFTLKISRVEAEDVGVYYCQQSFDDPFTFGQGTKLEIK

SEQ ID NO: 3128 - protein, 111 aa, Artificial Sequence
  source: /note="Description of Artificial Sequence: Synthetic polypeptide"
DIVLTQSPAFLSVTPGEKVTITCRASESVDSSGNSFMHWYQQKPDQAPQLLIYRASNLESGVPSRFSGSGSRTDFTFTISSLEAEDAATYYCQQSFDDPFTFGQGTKLEIK

SEQ ID NO: 3129 - protein, 111 aa, Artificial Sequence
  source: /note="Description of Artificial Sequence: Synthetic polypeptide"
DIQLIQSPSFLSASVGDRVSIICRASESVDSSGNSFMHWYLQKPGKSPQLFIYRASNLESGVSSRFSGRGSRTDFTLTIISLKPEDFAAYYCQQSFDDPFTFGQGTKLEIK

SEQ ID NO: 3130 - protein, 111 aa, Artificial Sequence
  source: /note="Description of Artificial Sequence: Synthetic polypeptide"
EIVLTQTPLSLSITPGEQASISCRASESVDSSGNSFMHWYLQKARPVPQLLIYRASNLESGVPDRFSGSGSRTDFTLKISRVEAEDFGVYYCQQSFDDPFTFGQGTKLEIK

SEQ ID NO: 3131 - protein, 111 aa, Artificial Sequence
  source: /note="Description of Artificial Sequence: Synthetic polypeptide"
EIVLTQTPLSLSITPGEQASMSCRASESVDSSGNSFMHWYLQKARPVPQLLIYRASNLESGVPDRFSGSGSRTDFTLKISRVEAEDFGVYYCQQSFDDPFTFGQGTKLEIK

SEQ ID NO: 3132 - protein, 111 aa, Artificial Sequence
  source: /note="Description of Artificial Sequence: Synthetic polypeptide"
EITLTQSPAFMSATPGDKVNISCRASESVDSSGNSFMHWYQQKPGEAPQFIIYRASNLESGIPPRFSGSGYRTDFTLTINNIESEDAAYYYCQQSFDDPFTFGQGTKLEIK

SEQ ID NO: 3133 - protein, 119 aa, Artificial Sequence
  source: /note="Description of Artificial Sequence: Synthetic polypeptide"
QVQLVQSGAEVKKPGASVKVSCKASGYAFSSSWMNWVRQAPGQGLEWIGRIYPGDGDTKYNGKFKGRATLTADKSTSTAYMELSSLRSEDTAVYYCARRGTGGWYFDVWGQGTTVTVSS

SEQ ID NO: 3134 - protein, 119 aa, Artificial Sequence
  source: /note="Description of Artificial Sequence: Synthetic polypeptide"
QVQLVQSGAEVKKPGSSVKVSCKASGYAFSSSWMNWVRQAPGQGLEWIGRIYPGDGDTKYNGKFKGRATLTADKSTSTAYMELSSLRSEDTAVYYCARRGTGGWYFDVWGQGTTVTVSS

SEQ ID NO: 3135 - protein, 119 aa, Artificial Sequence
  source: /note="Description of Artificial Sequence: Synthetic polypeptide"
QVQLVQSGAEVKKPGASVKVSCKASGYAFSSSWMNWVRQAPGKGLEWIGRIYPGDGDTKYNGKFKGRATLTADKSTSTAYMELSSLRSEDTAVYYCARRGTGGWYFDVWGQGTTVTVSS

SEQ ID NO: 3136 - protein, 119 aa, Artificial Sequence
  source: /note="Description of Artificial Sequence: Synthetic polypeptide"
QVQLVQSGAEVKKPGASVKVSCKASGYAFSSSWMNWVRQAPGQELEWIGRIYPGDGDTKYNGKFKGRATLTADKSISTAYMELSSLRSEDTATYYCARRGTGGWYFDVWGQGTTVTVSS

SEQ ID NO: 3137 - protein, 119 aa, Artificial Sequence
  source: /note="Description of Artificial Sequence: Synthetic polypeptide"
EVQLVQSGAEVKKPGATVKISCKASGYAFSSSWMNWVQQAPGKGLEWIGRIYPGDGDTKYNGKFKGRATLTADKSTSTAYMELSSLRSEDTAVYYCARRGTGGWYFDVWGQGTTVTVSS

SEQ ID NO: 3138 - protein, 119 aa, Artificial Sequence
  source: /note="Description of Artificial Sequence: Synthetic polypeptide"
QVQLVQSGAEVKKTGSSVKVSCKASGYAFSSSWMNWVRQAPGQALEWIGRIYPGDGDTKYNGKFKGRATLTADKSMSTAYMELSSLRSEDTAMYYCARRGTGGWYFDVWGQGTTVTVSS

SEQ ID NO: 3139 - protein, 119 aa, Artificial Sequence
  source: /note="Description of Artificial Sequence: Synthetic polypeptide"
QVQLVQSGAEVKKPGASVKVSCKASGYAFSSSWMNWVRQAPGQRLEWIGRIYPGDGDTKYNGKFKGRATLTADKSASTAYMELSSLRSEDMAVYYCARRGTGGWYFDVWGQGTTVTVSS

SEQ ID NO: 3140 - protein, 119 aa, Artificial Sequence
  source: /note="Description of Artificial Sequence: Synthetic polypeptide"
QVQLVQSGAEVKKPGASVKVSCKASGYAFSSSWMNWVRQAPGQGLEWIGRIYPGDGDTKYNGKFKGRATLTADKSTSTAYMELRSLRSDDMAVYYCARRGTGGWYFDVWGQGTTVTVSS

SEQ ID NO: 3141 - protein, 119 aa, Artificial Sequence
  source: /note="Description of Artificial Sequence: Synthetic polypeptide"
QVQLVQSGAEVKKPGASVKVSCKASGYAFSSSWMNWVRQAPGQRLEWIGRIYPGDGDTKYNGKFKGRATLTADKSASTAYMELSSLRSEDTAVYYCARRGTGGWYFDVWGQGTTVTVSS

SEQ ID NO: 3142 - protein, 119 aa, Artificial Sequence
  source: /note="Description of Artificial Sequence: Synthetic polypeptide"
QVQLVQSGAEVKKPGASVKVSCKASGYAFSSSWMNWVRQAPGQGLEWIGRIYPGDGDTKYNGKFKGRATLTADKSTSTAYMELRSLRSDDTAVYYCARRGTGGWYFDVWGQGTTVTVSS

SEQ ID NO: 3143 - protein, 119 aa, Artificial Sequence
  source: /note="Description of Artificial Sequence: Synthetic polypeptide"
QVQLVQSGAEVKKPGASVKVSCKASGYAFSSSWMNWVRQAPGQGLEWIGRIYPGDGDTKYNGKFKGRATLTADKSISTAYMELSRLRSDDTAVYYCARRGTGGWYFDVWGQGTTVTVSS

SEQ ID NO: 3144 - protein, 119 aa, Artificial Sequence
  source: /note="Description of Artificial Sequence: Synthetic polypeptide"
QVQLVQSGAEVKKPGASVKVSCKASGYAFSSSWMNWVRQAPGQGLEWIGRIYPGDGDTKYNGKFKGRATLTADKSISTAYMELSRLRSDDTVVYYCARRGTGGWYFDVWGQGTTVTVSS

SEQ ID NO: 3145 - protein, 119 aa, Artificial Sequence
  source: /note="Description of Artificial Sequence: Synthetic polypeptide"
QVQLVQSGAEVKKPGASVKVSCKASGYAFSSSWMNWVRQAPGQGLEWIGRIYPGDGDTKYNGKFKGWATLTADKSISTAYMELSRLRSDDTAVYYCARRGTGGWYFDVWGQGTTVTVSS

SEQ ID NO: 3146 - protein, 119 aa, Artificial Sequence
  source: /note="Description of Artificial Sequence: Synthetic polypeptide"
QVQLVQSGAEVKKPGASVKVSCKASGYAFSSSWMNWVRQATGQGLEWIGRIYPGDGDTKYNGKFKGRATLTANKSISTAYMELSSLRSEDTAVYYCARRGTGGWYFDVWGQGTTVTVSS

SEQ ID NO: 3147 - protein, 119 aa, Artificial Sequence
  source: /note="Description of Artificial Sequence: Synthetic polypeptide"
QVQLVQSGSELKKPGASVKVSCKASGYAFSSSWMNWVRQAPGQGLEWIGRIYPGDGDTKYNGKFKGRAVLSADKSVSTAYLQISSLKAEDTAVYYCARRGTGGWYFDVWGQGTTVTVSS

SEQ ID NO: 3148 - protein, 119 aa, Artificial Sequence
  source: /note="Description of Artificial Sequence: Synthetic polypeptide"
QVQLVQSGPEVKKPGTSVKVSCKASGYAFSSSWMNWVRQARGQRLEWIGRIYPGDGDTKYNGKFKGRATLTADKSTSTAYMELSSLRSEDTAVYYCARRGTGGWYFDVWGQGTTVTVSS

SEQ ID NO: 3149 - protein, 119 aa, Artificial Sequence
  source: /note="Description of Artificial Sequence: Synthetic polypeptide"
EVQLVQSGAEVKKPGESLKISCKASGYAFSSSWMNWVRQMPGKGLEWIGRIYPGDGDTKYNGKFKGQATLSADKSISTAYLQWSSLKASDTAMYYCARRGTGGWYFDVWGQGTTVTVSS

SEQ ID NO: 3150 - protein, 119 aa, Artificial Sequence
  source: /note="Description of Artificial Sequence: Synthetic polypeptide"
QVQLVQSGSELKKPGASVKVSCKASGYAFSSSWMNWVRQAPGQGLEWIGRIYPGDGDTKYNGKFKGRAVLSADKSVSMAYLQISSLKAEDTAVYYCARRGTGGWYFDVWGQGTTVTVSS

SEQ ID NO: 3151 - protein, 119 aa, Artificial Sequence
  source: /note="Description of Artificial Sequence: Synthetic polypeptide"
QVQLVQSGHEVKQPGASVKVSCKASGYAFSSSWMNWVPQAPGQGLEWIGRIYPGDGDTKYNGKFKGRAVLSADKSASTAYLQISSLKAEDMAMYYCARRGTGGWYFDVWGQGTTVTVSS

SEQ ID NO: 3152 - protein, 119 aa, Artificial Sequence
  source: /note="Description of Artificial Sequence: Synthetic polypeptide"
EVQLVQSGAEVKKPGESLKISCKASGYAFSSSWMNWVRQMPGKGLEWIGRIYPGDGDTKYNGKFKGQATLSADKPISTAYLQWSSLKASDTAMYYCARRGTGGWYFDVWGQGTTVTVSS

SEQ ID NO: 3153 - protein, 119 aa, Artificial Sequence
  source: /note="Description of Artificial Sequence: Synthetic polypeptide"
EVQLVQSGAEVKKPGESLRISCKASGYAFSSSWMNWVRQMPGKGLEWIGRIYPGDGDTKYNGKFKGQATLSADKSISTAYLQWSSLKASDTAMYYCARRGTGGWYFDVWGQGTTVTVSS

SEQ ID NO: 3154 - protein, 119 aa, Artificial Sequence
  source: /note="Description of Artificial Sequence: Synthetic polypeptide"
EVQLVQSGAEVKKPGESLRISCKASGYAFSSSWMNWVRQMPGKGLEWIGRIYPGDGDTKYNGKFKGHATLSADKSISTAYLQWSSLKASDTAMYYCARRGTGGWYFDVWGQGTTVTVSS

SEQ ID NO: 3155 - protein, 119 aa, Artificial Sequence
  source: /note="Description of Artificial Sequence: Synthetic polypeptide"
QVQLVQSGAEVKKTGSSVKVSCKASGYAFSSSWMNWVRQAPRQALEWIGRIYPGDGDTKYNGKFKGRATLTADKSMSTAYMELSSLRSEDTAMYYCARRGTGGWYFDVWGQGTTVTVSS

SEQ ID NO: 3156 - protein, 119 aa, Artificial Sequence
  source: /note="Description of Artificial Sequence: Synthetic polypeptide"
EVQLVESGGGLVQPGRSLRLSCTASGYAFSSSWMNWVRQAPGKGLEWIGRIYPGDGDTKYNGKFKGRATLSADKSKSIAYLQMNSLKTEDTAVYYCARRGTGGWYFDVWGQGTTVTVSS

SEQ ID NO: 3157 - protein, 119 aa, Artificial Sequence
  source: /note="Description of Artificial Sequence: Synthetic polypeptide"
EVQLVESGGGLVQPGPSLRLSCTASGYAFSSSWMNWVRQAPGKGLEWIGRIYPGDGDTKYNGKFKGRATLSADKSKSIAYLQMNSLKTEDTAVYYCARRGTGGWYFDVWGQGTTVTVSS

SEQ ID NO: 3158 - protein, 119 aa, Artificial Sequence
  source: /note="Description of Artificial Sequence: Synthetic polypeptide"
QVQLQESGPGLVKPSQTLSLTCTASGYAFSSSWMNWVRQPPGKGLEWIGRIYPGDGDTKYNGKFKGRATLSADKSKSQASLKLSSVTAADTAVYYCARRGTGGWYFDVWGQGTTVTVSS

SEQ ID NO: 3159 - protein, 119 aa, Artificial Sequence
  source: /note="Description of Artificial Sequence: Synthetic polypeptide"
QVQLQESGPGLVKPSGTLSLTCAASGYAFSSSWMNWVRQPPGKGLEWIGRIYPGDGDTKYNGKFKGRATLSADKSKSQASLKLSSVTAADTAVYYCARRGTGGWYFDVWGQGTTVTVSS

SEQ ID NO: 3160 - protein, 119 aa, Artificial Sequence
  source: /note="Description of Artificial Sequence: Synthetic polypeptide"
EVQLVESGGGLVKPGRSLRLSCTASGYAFSSSWMNWVRQAPGKGLEWIGRIYPGDGDTKYNGKFKGRATLSADKSKSIAYLQMNSLKTEDTAVYYCARRGTGGWYFDVWGQGTTVTVSS

SEQ ID NO: 3161 - protein, 119 aa, Artificial Sequence
  source: /note="Description of Artificial Sequence: Synthetic polypeptide"
EVQLVESGGGLVQPGGSLKLSCAASGYAFSSSWMNWVRQASGKGLEWIGRIYPGDGDTKYNGKFKGRATLSADKSKSTAYLQMNSLKTEDTAVYYCARRGTGGWYFDVWGQGTTVTVSS

SEQ ID NO: 3162 - protein, 119 aa, Artificial Sequence
  source: /note="Description of Artificial Sequence: Synthetic polypeptide"
QVQLQESGPGLVKPSQTLSLTCAASGYAFSSSWMNWVRQPPGKGLEWIGRIYPGDGDTKYNGKFKGRATLSADKSKSQASLKLSSVTAADTAVYYCARRGTGGWYFDVWGQGTTVTVSS

SEQ ID NO: 3163 - protein, 119 aa, Artificial Sequence
  source: /note="Description of Artificial Sequence: Synthetic polypeptide"
EVQLVESGGGLVKPGGSLRLSCAASGYAFSSSWMNWVRQAPGKGLEWIGRIYPGDGDTKYNGKFKGRATLSADKSKSTAYLQMNSLKTEDTAVYYCARRGTGGWYFDVWGQGTTVTVSS

SEQ ID NO: 3164 - protein, 119 aa, Artificial Sequence
  source: /note="Description of Artificial Sequence: Synthetic polypeptide"
EVQLVESGGALVKPGGSLRLSCAASGYAFSSSWMNWVRQAPGKGLEWIGRIYPGDGDTKYNGKFKGRATLSADKSKSTAYLQMNSLKTEDTAVYYCARRGTGGWYFDVWGQGTTVTVSS

SEQ ID NO: 3165 - protein, 119 aa, Artificial Sequence
  source: /note="Description of Artificial Sequence: Synthetic polypeptide"
QVQLQESGPGLVKPSQTLSLTCAAYGYAFSSSWMNWVRQPPGKGLEWIGRIYPGDGDTKYNGKFKGRATLSADKSKSQASLKLSSVTAADTAVYYCARRGTGGWYFDVWGQGTTVTVSS

SEQ ID NO: 3166 - protein, 119 aa, Artificial Sequence
  source: /note="Description of Artificial Sequence: Synthetic polypeptide"
QVQLQESGSGLVKPSQTLSLTCAASGYAFSSSWMNWVRQPPGKGLEWIGRIYPGDGDTKYNGKFKGRATLSADKSKSQASLKLSSVTAADTAVYYCARRGTGGWYFDVWGQGTTVTVSS

SEQ ID NO: 3167 - protein, 119 aa, Artificial Sequence
  source: /note="Description of Artificial Sequence: Synthetic polypeptide"
EVQLVESGGGLVQPGGSLRLSCAASGYAFSSSWMNWVRQAPGKGLEWIGRIYPGDGDTKYNGKFKGRATLSADKSKSSAYLQMNSLKTEDTAVYYCARRGTGGWYFDVWGQGTTVTVSS

SEQ ID NO: 3168 - protein, 119 aa, Artificial Sequence
  source: /note="Description of Artificial Sequence: Synthetic polypeptide"
QVQLQESGPGLVKPSDTLSLTCTASGYAFSSSWMNWVRQPPGKGLEWIGRIYPGDGDTKYNGKFKGRATLSADKSKSQASLKLSSVTAADTAVYYCARRGTGGWYFDVWGQGTTVTVSS

SEQ ID NO: 3169 - protein, 119 aa, Artificial Sequence
  source: /note="Description of Artificial Sequence: Synthetic polypeptide"
QVQLQESGPGLVKPSQTLSLTCTASGYAFSSSWMNWVRQHPGKGLEWIGRIYPGDGDTKYNGKFKGRATLSADKSKSQASLKLSSVTAADTAVYYCARRGTGGWYFDVWGQGTTVTVSS

SEQ ID NO: 3170 - protein, 119 aa, Artificial Sequence
  source: /note="Description of Artificial Sequence: Synthetic polypeptide"
QVQLQESGPGLVKPSQTLSLTCTASGYAFSSSWMNWVRQHPGKGLEWIGRIYPGDGDTKYNGKFKGLATLSADKSKSQASLKLSSVTAADTAVYYCARRGTGGWYFDVWGQGTTVTVSS

SEQ ID NO: 3171 - protein, 119 aa, Artificial Sequence
  source: /note="Description of Artificial Sequence: Synthetic polypeptide"
QVQLVESGGGVVQPGRSLRLSCAASGYAFSSSWMNWVRQAPGKGLEWIGRIYPGDGDTKYNGKFKGRATLSADKSKSTAYLQMSSLRAEDTAVYYCARRGTGGWYFDVWGQGTTVTVSS

SEQ ID NO: 3172 - protein, 119 aa, Artificial Sequence
  source: /note="Description of Artificial Sequence: Synthetic polypeptide"
QVQLVESGGGLVKPGGSLRLSCAASGYAFSSSWMNWVRQAPGKGLEWIGRIYPGDGDTKYNGKFKGRATLSADKAKSSAYLQMNSLRAEDTAVYYCARRGTGGWYFDVWGQGTTVTVSS

SEQ ID NO: 3173 - protein, 119 aa, Artificial Sequence
  source: /note="Description of Artificial Sequence: Synthetic polypeptide"
QVQLVESGGGLVQPGGSLRLSCSASGYAFSSSWMNWVRQAPGKGLEWIGRIYPGDGDTKYNGKFKGRATLSADKSKSTAYLQMNSLRAEDTAVYYCARRGTGGWYFDVWGQGTTVTVSS

SEQ ID NO: 3174 - protein, 119 aa, Artificial Sequence
  source: /note="Description of Artificial Sequence: Synthetic polypeptide"
QVQLLESGGGLVKPGGSLRLSCAASGYAFSSSWMNWVRQAPGKGLEWIGRIYPGDGDTKYNGKFKGRATLSADKAKSSAYLQMNSLRAEDTAVYYCARRGTGGWYFDVWGQGTTVTVSS

SEQ ID NO: 3175 - protein, 119 aa, Artificial Sequence
  source: /note="Description of Artificial Sequence: Synthetic polypeptide"
EVQLVESGGGLVQPGGSLRLSCSASGYAFSSSWMNWVRQAPGKGLEWIGRIYPGDGDTKYNGKFKGRATLSADKSKSTAYLQMSSLRAEDTAVYYCARRGTGGWYFDVWGQGTTVTVSS

SEQ ID NO: 3176 - protein, 119 aa, Artificial Sequence
  source: /note="Description of Artificial Sequence: Synthetic polypeptide"
QVQLQESGPGLVKPSDTLSLTCAASGYAFSSSWMNWVRQPPGKGLEWIGRIYPGDGDTKYNGKFKGRATLSADKSKSQASLKLSSVTAVDTAVYYCARRGTGGWYFDVWGQGTTVTVSS

SEQ ID NO: 3177 - protein, 119 aa, Artificial Sequence
  source: /note="Description of Artificial Sequence: Synthetic polypeptide"
QVQLQESGPGLVKPSQTLSLTCAASGYAFSSSWMNWVRQPPGKGLEWIGRIYPGDGDTKYNGKFKGRATLSADKSKSQASLKLSSVTAVDTAVYYCARRGTGGWYFDVWGQGTTVTVSS

SEQ ID NO: 3178 - protein, 119 aa, Artificial Sequence
  source: /note="Description of Artificial Sequence: Synthetic polypeptide"
EVQLVESGGGLVQPGGSLRLSCSASGYAFSSSWMNWVRQAPGKGLEWIGRIYPGDGDTKYNGKFKGRATLSADKSKSTAYVQMSSLRAEDTAVYYCARRGTGGWYFDVWGQGTTVTVSS

SEQ ID NO: 3179 - protein, 119 aa, Artificial Sequence
  source: /note="Description of Artificial Sequence: Synthetic polypeptide"
QVQLVDSGGGVVQPGRSLRLSCAASGYAFSSSWMNWVRQAPGKGLEWIGRIYPGDGDTKYNGKFKGRATLSADKSKSTAYLQMNSLRAEDTAVYYCARRGTGGWYFDVWGQGTTVTVSS

SEQ ID NO: 3180 - protein, 119 aa, Artificial Sequence
  source: /note="Description of Artificial Sequence: Synthetic polypeptide"
QVQLVESGGGVVQPGRSLRLSCAASGYAFSSSWMNWVRQAPGKGLEWIGRIYPGDGDTKYNGKFKGRATLSADKSKSTAYLQMNSLRAEGTAVYYCARRGTGGWYFDVWGQGTTVTVSS

SEQ ID NO: 3181 - protein, 119 aa, Artificial Sequence
  source: /note="Description of Artificial Sequence: Synthetic polypeptide"
QVQLVESGGGVVQPGRSLRLSCAASGYAFSSSWMNWVRQAPGKGLEWIGRIYPGDGDTKYNGKFKGRATLSADKSKSTAYLQMNSLRAEDTAVYYCARRGTGGWYFDVWGQGTTVTVSS

SEQ ID NO: 3182 - protein, 119 aa, Artificial Sequence
  source: /note="Description of Artificial Sequence: Synthetic polypeptide"
EVQLVESGGGLVQPGGSLRLSCAASGYAFSSSWMNWVRQAPGKGLEWIGRIYPGDGDTKYNGKFKGRATLSADKSKSTAYLQMNSLRAEDTAVYYCARRGTGGWYFDVWGQGTTVTVSS

SEQ ID NO: 3183 - protein, 117 aa, Artificial Sequence
  source: /note="Description of Artificial Sequence: Synthetic polypeptide"
EVQLVESGGDLVKPGGSLKLSCAVSGFTFRSYGMSWVRQTPDKRLEWVALISSGGSYTYYTDSVKGRFTISRDNAKNTLYLQMSSLKSEDTAIYYCSRHGGNFFDYWGQGTTLTVSS

SEQ ID NO: 3184 - protein, 107 aa, Artificial Sequence
  source: /note="Description of Artificial Sequence: Synthetic polypeptide"
QIVLTQSPSIMSASPGEKVTMTCSVSSSVSYMHWYQQKSGTSPKRWIYDTSKLASGVPARFSGSGSGTSYSLTISSMEAEDAATYYCQQWSSNPQYTFGGGTKLEIK

SEQ ID NO: 3185 - protein, 107 aa, Artificial Sequence
  source: /note="Description of Artificial Sequence: Synthetic polypeptide"
DIVLTQSPAFLSVTPGEKVTITCSVSSSVSYMHWYQQKPDQAPKLLIYDTSKLASGVPSRFSGSGSGTDYTFTISSLEAEDAATYYCQQWSSNPQYTFGQGTKLEIK

SEQ ID NO: 3186 - protein, 107 aa, Artificial Sequence
  source: /note="Description of Artificial Sequence: Synthetic polypeptide"
AIQLTQSPSSLSASVGDRVTITCSVSSSVSYMHWYQQKPGKAPKLLIYDTSKLASGVPSRFSGSGSGTDYTLTISSLQPEDFATYYCQQWSSNPQYTFGQGTKLEIK

SEQ ID NO: 3187 - protein, 107 aa, Artificial Sequence
  source: /note="Description of Artificial Sequence: Synthetic polypeptide"
DIQLTQSPSFLSASVGDRVTITCSVSSSVSYMHWYQQKPGKAPKLLIYDTSKLASGVPSRFSGSGSGTEYTLTISSLQPEDFATYYCQQWSSNPQYTFGQGTKLEIK

SEQ ID NO: 3188 - protein, 107 aa, Artificial Sequence
  source: /note="Description of Artificial Sequence: Synthetic polypeptide"
DIQLTQSPSSLSASVGDRVTITCSVSSSVSYMHWYQQKPGKAPKLLIYDTSKLASGVPSRFSGSGSGTDYTLTISSLQPEDFATYYCQQWSSNPQYTFGQGTKLEIK

SEQ ID NO: 3189 - protein, 107 aa, Artificial Sequence
  source: /note="Description of Artificial Sequence: Synthetic polypeptide"
DIQLTQSPSSVSASVGDRVTITCSVSSSVSYMHWYQQKPGKAPKLLIYDTSKLASGVPSRFSGSGSGTDYTLTISSLQPEDFATYYCQQWSSNPQYTFGQGTKLEIK

SEQ ID NO: 3190 - protein, 107 aa, Artificial Sequence
  source: /note="Description of Artificial Sequence: Synthetic polypeptide"
DIQLTQSPSSLSASVGDRVTITCSVSSSVSYMHWYQQKPGKVPKLLIYDTSKLASGVPSRFSGSGSGTDYTLTISSLQPEDVATYYCQQWSSNPQYTFGQGTKLEIK

SEQ ID NO: 3191 - protein, 107 aa, Artificial Sequence
  source: /note="Description of Artificial Sequence: Synthetic polypeptide"
DIQLTQSPSSLSASVGDRVTITCSVSSSVSYMHWYQQKPGQAPKLLIYDTSKLASGVPSRFSGSGSGTDYTLTISSLQPEDVATYYCQQWSSNPQYTFGQGTKLEIK

SEQ ID NO: 3192 - protein, 107 aa, Artificial Sequence
  source: /note="Description of Artificial Sequence: Synthetic polypeptide"
EIVLTQSPDFQSVTPKEKVTITCSVSSSVSYMHWYQQKPDQSPKLLIYDTSKLASGVPSRFSGSGSGTDYTLTINSLEAEDAATYYCQQWSSNPQYTFGQGTKLEIK

SEQ ID NO: 3193 - protein, 107 aa, Artificial Sequence
  source: /note="Description of Artificial Sequence: Synthetic polypeptide"
AIRLTQSPFSLSASVGDRVTITCSVSSSVSYMHWYQQKPAKAPKLFIYDTSKLASGVPSRFSGSGSGTDYTLTISSLQPEDFATYYCQQWSSNPQYTFGQGTKLEIK

SEQ ID NO: 3194 - protein, 107 aa, Artificial Sequence
  source: /note="Description of Artificial Sequence: Synthetic polypeptide"
DIQLTQSPSSLSASVGDRVTITCSVSSSVSYMHWYQQKPGKAPKLLIYDTSKLASGVPSRFSGSGSGTDYTFTISSLQPEDIATYYCQQWSSNPQYTFGQGTKLEIK

SEQ ID NO: 3195 - protein, 107 aa, Artificial Sequence
  source: /note="Description of Artificial Sequence: Synthetic polypeptide"
EIVLTQSPATLSLSPGERATLSCSVSSSVSYMHWYQQKPGQAPKLLIYDTSKLASGIPARFSGSGSGTDYTLTISSLEPEDFAVYYCQQWSSNPQYTFGQGTKLEIK

SEQ ID NO: 3196 - protein, 107 aa, Artificial Sequence
  source: /note="Description of Artificial Sequence: Synthetic polypeptide"
DIQLTQSPSTLSASVGDRVTITCSVSSSVSYMHWYQQKPGKAPKLLIYDTSKLASGVPSRFSGSGSGTEYTLTISSLQPDDFATYYCQQWSSNPQYTFGQGTKLEIK

SEQ ID NO: 3197 - protein, 107 aa, Artificial Sequence
  source: /note="Description of Artificial Sequence: Synthetic polypeptide"
DIQLTQSPSSLSASVGDRVTITCSVSSSVSYMHWYQQKPGKTPKLLIYDTSKLASGIPSRFSGSGSGTDYTLTIRSLQPEDFATYYCQQWSSNPQYTFGQGTKLEIK

SEQ ID NO: 3198 - protein, 107 aa, Artificial Sequence
  source: /note="Description of Artificial Sequence: Synthetic polypeptide"
EIVLTQSPPTLSLSPGERVTLSCSVSSSVSYMHWYQQKPGQAPKLLIYDTSKLASGIPARFSGSGSGTDYTLTISSLQPEDFAVYYCQQWSSNPQYTFGQGTKLEIK

SEQ ID NO: 3199 - protein, 107 aa, Artificial Sequence
  source: /note="Description of Artificial Sequence: Synthetic polypeptide"
DIQLTQSPSSLSASVGDRVTITCSVSSSVSYMHWYQQKPGKAPKRLIYDTSKLASGVPSRFSGSGSGTEYTLTISSLQPEDFATYYCQQWSSNPQYTFGQGTKLEIK

SEQ ID NO: 3200 - protein, 107 aa, Artificial Sequence
  source: /note="Description of Artificial Sequence: Synthetic polypeptide"
EIVLTQSPATLSLSPGERATLSCSVSSSVSYMHWYQQKPGQAPKLLIYDTSKLASGIPARFSGSGPGTDYTLTISSLEPEDFAVYYCQQWSSNPQYTFGQGTKLEIK

SEQ ID NO: 3201 - protein, 107 aa, Artificial Sequence
  source: /note="Description of Artificial Sequence: Synthetic polypeptide"
EIVLTQSPATLSLSPGERATLSCSVSSSVSYMHWYQQKPGQAPKLLIYDTSKLASGIPARFSGSGSGTDYTLTISRLEPEDFAVYYCQQWSSNPQYTFGQGTKLEIK

SEQ ID NO: 3202 - protein, 107 aa, Artificial Sequence
  source: /note="Description of Artificial Sequence: Synthetic polypeptide"
EIVLTQSPATLSLSPGERATLSCSVSSSVSYMHWYQQKPGQAPKLLIYDTSKLASGIPARFSGSGSGTDYTLTISSLQPEDFAVYYCQQWSSNPQYTFGQGTKLEIK

SEQ ID NO: 3203 - protein, 107 aa, Artificial Sequence
  source: /note="Description of Artificial Sequence: Synthetic polypeptide"
EIVLTQSPATLSVSPGERATLSCSVSSSVSYMHWYQQKPGQAPKLLIYDTSKLASGIPARFSGSGSGTEYTLTISSLQSEDFAVYYCQQWSSNPQYTFGQGTKLEIK

SEQ ID NO: 3204 - protein, 107 aa, Artificial Sequence
  source: /note="Description of Artificial Sequence: Synthetic polypeptide"
EIVLTQSPATLSVSPGERATLSCSVSSSVSYMHWYQQKPGQAPKLLIYDTSKLASGIPARFSGSGSGTEYTLTISILQSEDFAVYYCQQWSSNPQYTFGQGTKLEIK

SEQ ID NO: 3205 - protein, 107 aa, Artificial Sequence
  source: /note="Description of Artificial Sequence: Synthetic polypeptide"
EIVLTQSPPTLSLSPGERVTLSCSVSSSVSYMHWYQQKPGQAPKLLIYDTSKLASSIPARFSGSGSGTDYTLTISSLQPEDFAVYYCQQWSSNPQYTFGQGTKLEIK

SEQ ID NO: 3206 - protein, 107 aa, Artificial Sequence
  source: /note="Description of Artificial Sequence: Synthetic polypeptide"
DIQLTQSPSSLSASVGDRVTITCSVSSSVSYMHWYQQKPGKAPKSLIYDTSKLASGVPSRFSGSGSGTDYTLTISSLQPEDFATYYCQQWSSNPQYTFGQGTKLEIK

SEQ ID NO: 3207 - protein, 107 aa, Artificial Sequence
  source: /note="Description of Artificial Sequence: Synthetic polypeptide"
DIQLTQSPSSLSASVGDRVTITCSVSSSVSYMHWYQQKPGKAPKRLIYDTSKLASGVPSRFSGSGSGTEYTLTISNLQPEDFATYYCQQWSSNPQYTFGQGTKLEIK

SEQ ID NO: 3208 - protein, 107 aa, Artificial Sequence
  source: /note="Description of Artificial Sequence: Synthetic polypeptide"
DIQLTQSPSAMSASVGDRVTITCSVSSSVSYMHWYQQKPGKVPKRLIYDTSKLASGVPSRFSGSGSGTEYTLTISSLQPEDFATYYCQQWSSNPQYTFGQGTKLEIK

SEQ ID NO: 3209 - protein, 107 aa, Artificial Sequence
  source: /note="Description of Artificial Sequence: Synthetic polypeptide"
EIVLTQSPATLSLSPGERATLSCSVSSSVSYMHWYQQKPGQAPKLLIYDTSKLASGIPDRFSGSGSGTDYTLTISRLEPEDFAVYYCQQWSSNPQYTFGQGTKLEIK

SEQ ID NO: 3210 - protein, 107 aa, Artificial Sequence
  source: /note="Description of Artificial Sequence: Synthetic polypeptide"
EIVLTQSPATLSLSPGERATLSCSVSSSVSYMHWYQQKPGLAPKLLIYDTSKLASGIPDRFSGSGSGTDYTLTISRLEPEDFAVYYCQQWSSNPQYTFGQGTKLEIK

SEQ ID NO: 3211 - protein, 107 aa, Artificial Sequence
  source: /note="Description of Artificial Sequence: Synthetic polypeptide"
EIVLTQSPGTLSLSPGERATLSCSVSSSVSYMHWYQQKPGQAPKLLIYDTSKLASGIPDRFSGSGSGTDYTLTISRLEPEDFAVYYCQQWSSNPQYTFGQGTKLEIK

SEQ ID NO: 3212 - protein, 107 aa, Artificial Sequence
  source: /note="Description of Artificial Sequence: Synthetic polypeptide"
DIQLTQSPSSLSASVGDRVTITCSVSSSVSYMHWYQQKPGKAPKSLIYDTSKLASGVPSKFSGSGSGTDYTLTISSLQPEDFATYYCQQWSSNPQYTFGQGTKLEIK

SEQ ID NO: 3213 - protein, 107 aa, Artificial Sequence
  source: /note="Description of Artificial Sequence: Synthetic polypeptide"
DIQLTQSPSSLSASVGDRVTITCSVSSSVSYMHWYQQKPEKAPKSLIYDTSKLASGVPSRFSGSGSGTDYTLTISSLQPEDFATYYCQQWSSNPQYTFGQGTKLEIK

SEQ ID NO: 3214 - protein, 107 aa, Artificial Sequence
  source: /note="Description of Artificial Sequence: Synthetic polypeptide"
DIVLTQSPDSLAVSLGERATINCSVSSSVSYMHWYQQKPGQPPKLLIYDTSKLASGVPDRFSGSGSGTDYTLTISSLQAEDVAVYYCQQWSSNPQYTFGQGTKLEIK

SEQ ID NO: 3215 - protein, 107 aa, Artificial Sequence
  source: /note="Description of Artificial Sequence: Synthetic polypeptide"
EIVLTQTPLSLSITPGEQASMSCSVSSSVSYMHWYLQKARPVPKLLIYDTSKLASGVPDRFSGSGSGTDYTLKISRVEAEDFGVYYCQQWSSNPQYTFGQGTKLEIK

SEQ ID NO: 3216 - protein, 107 aa, Artificial Sequence
  source: /note="Description of Artificial Sequence: Synthetic polypeptide"
EIVLTQTPLSLSITPGEQASISCSVSSSVSYMHWYLQKARPVPKLLIYDTSKLASGVPDRFSGSGSGTDYTLKISRVEAEDFGVYYCQQWSSNPQYTFGQGTKLEIK

SEQ ID NO: 3217 - protein, 107 aa, Artificial Sequence
  source: /note="Description of Artificial Sequence: Synthetic polypeptide"
DIVLTQSPLSLPVTPGEPASISCSVSSSVSYMHWYLQKPGQSPKLLIYDTSKLASGVPDRFSGSGSGTDYTLKISRVEAEDVGVYYCQQWSSNPQYTFGQGTKLEIK

SEQ ID NO: 3218 - protein, 107 aa, Artificial Sequence
  source: /note="Description of Artificial Sequence: Synthetic polypeptide"
DIVLTQSPLSLPVTLGQPASISCSVSSSVSYMHWYQQRPGQSPKRLIYDTSKLASGVPDRFSGSGSGTDYTLKISRVEAEDVGVYYCQQWSSNPQYTFGQGTKLEIK

SEQ ID NO: 3219 - protein, 107 aa, Artificial Sequence
  source: /note="Description of Artificial Sequence: Synthetic polypeptide"
DIVLTQTPLSLPVTPGEPASISCSVSSSVSYMHWYLQKPGQSPKLLIYDTSKLASGVPDRFSGSGSGTDYTLKISRVEAEDVGVYYCQQWSSNPQYTFGQGTKLEIK

SEQ ID NO: 3220 - protein, 107 aa, Artificial Sequence
  source: /note="Description of Artificial Sequence: Synthetic polypeptide"
DIVLTQTPLSLSVTPGQPASISCSVSSSVSYMHWYLQKPGQSPKLLIYDTSKLASGVPDRFSGSGSGTDYTLKISRVEAEDVGVYYCQQWSSNPQYTFGQGTKLEIK

SEQ ID NO: 3221 - protein, 107 aa, Artificial Sequence
  source: /note="Description of Artificial Sequence: Synthetic polypeptide"
DIVLTQTPLSLSVTPGQPASISCSVSSSVSYMHWYLQKPGQPPKLLIYDTSKLASGVPDRFSGSGSGTDYTLKISRVEAEDVGVYYCQQWSSNPQYTFGQGTKLEIK

SEQ ID NO: 3222 - protein, 107 aa, Artificial Sequence
  source: /note="Description of Artificial Sequence: Synthetic polypeptide"
DIQLIQSPSFLSASVGDRVSIICSVSSSVSYMHWYLQKPGKSPKLFIYDTSKLASGVSSRFSGRGSGTDYTLTIISLKPEDFAAYYCQQWSSNPQYTFGQGTKLEIK

SEQ ID NO: 3223 - protein, 107 aa, Artificial Sequence
  source: /note="Description of Artificial Sequence: Synthetic polypeptide"
DIVLTQTPLSSPVTLGQPASISCSVSSSVSYMHWYQQRPGQPPKLLIYDTSKLASGVPDRFSGSGAGTDYTLKISRVEAEDVGVYYCQQWSSNPQYTFGQGTKLEIK

SEQ ID NO: 3224 - protein, 107 aa, Artificial Sequence
  source: /note="Description of Artificial Sequence: Synthetic polypeptide"
EITLTQSPAFMSATPGDKVNISCSVSSSVSYMHWYQQKPGEAPKFIIYDTSKLASGIPPRFSGSGYGTDYTLTINNIESEDAAYYYCQQWSSNPQYTFGQGTKLEIK

SEQ ID NO: 3225 - protein, 117 aa, Artificial Sequence
  source: /note="Description of Artificial Sequence: Synthetic polypeptide"
EVQLVESGGGLVKPGGSLRLSCAVSGFTFRSYGMSWVRQAPGKGLEWVALISSGGSYTYYTDSVKGRFTISRDNSKNTLYLQMNSLKTEDTAVYYCSRHGGNFFDYWGQGTTVTVSS

SEQ ID NO: 3226 - protein, 117 aa, Artificial Sequence
  source: /note="Description of Artificial Sequence: Synthetic polypeptide"
EVQLVESGGALVKPGGSLRLSCAVSGFTFRSYGMSWVRQAPGKGLEWVALISSGGSYTYYTDSVKGRFTISRDNSKNTLYLQMNSLKTEDTAVYYCSRHGGNFFDYWGQGTTVTVSS

SEQ ID NO: 3227 - protein, 117 aa, Artificial Sequence
  source: /note="Description of Artificial Sequence: Synthetic polypeptide"
EVQLVESGGGLVQPGGSLRLSCAVSGFTFRSYGMSWVRQAPGKGLEWVALISSGGSYTYYTDSVKGRFTISRDNAKNTLYLQMNSLRAEDTAVYYCSRHGGNFFDYWGQGTTVTVSS

SEQ ID NO: 3228 - protein, 117 aa, Artificial Sequence
  source: /note="Description of Artificial Sequence: Synthetic polypeptide"
EVQLVESGGGLVQPGGSLRLSCAVSGFTFRSYGMSWVRQAPGKGLEWVALISSGGSYTYYTDSVKGRFTISRDNAKNSLYLQMNSLRAEDTAVYYCSRHGGNFFDYWGQGTTVTVSS

SEQ ID NO: 3229 - protein, 117 aa, Artificial Sequence
  source: /note="Description of Artificial Sequence: Synthetic polypeptide"
EVQLVESGGGLVQPGGSLRLSCAVSGFTFRSYGMSWVRQAPGKGLEWVALISSGGSYTYYTDSVKGRFTISRDNSKNSLYLQMNSLKTEDTAVYYCSRHGGNFFDYWGQGTTVTVSS

SEQ ID NO: 3230 - protein, 117 aa, Artificial Sequence
  source: /note="Description of Artificial Sequence: Synthetic polypeptide"
EVQLVESGGGLVQPGGSLRLSCAVSGFTFRSYGMSWVRQAPGKGLEWVALISSGGSYTYYTDSVKGRFTISRDNAKNSLYLQMNSLRAEDMAVYYCSRHGGNFFDYWGQGTTVTVSS

SEQ ID NO: 3231 - protein, 117 aa, Artificial Sequence
  source: /note="Description of Artificial Sequence: Synthetic polypeptide"
EVQLVESGGGLVQPGGSLRLSCAVSGFTFRSYGMSWVRQAPGKGLEWVALISSGGSYTYYTDSVKGQFTISRDNAKNTLYLQMNSLRAEDMAVYYCSRHGGNFFDYWGQGTTVTVSS

SEQ ID NO: 3232 - protein, 117 aa, Artificial Sequence
  source: /note="Description of Artificial Sequence: Synthetic polypeptide"
EVQLVESGGGLVKPGRSLRLSCTVSGFTFRSYGMSWVRQAPGKGLEWVALISSGGSYTYYTDSVKGRFTISRDNSKNILYLQMNSLKTEDTAVYYCSRHGGNFFDYWGQGTTVTVSS

SEQ ID NO: 3233 - protein, 117 aa, Artificial Sequence
  source: /note="Description of Artificial Sequence: Synthetic polypeptide"
EVQLVESGGGLVKPGGSLRLSCAVSGFTFRSYGMSWVRQAPGKGLEWVALISSGGSYTYYTDSVKGRFTISRDNAKNSLYLQMNSLRAEDTAVYYCSRHGGNFFDYWGQGTTVTVSS

SEQ ID NO: 3234 - protein, 117 aa, Artificial Sequence
  source: /note="Description of Artificial Sequence: Synthetic polypeptide"
EVQLVESGGGLVQPGGSLKLSCAVSGFTFRSYGMSWVRQASGKGLEWVALISSGGSYTYYTDSVKGRFTISRDNSKNTLYLQMNSLKTEDTAVYYCSRHGGNFFDYWGQGTTVTVSS

SEQ ID NO: 3235 - protein, 117 aa, Artificial Sequence
  source: /note="Description of Artificial Sequence: Synthetic polypeptide"
QVQLVESGGGVVQPGGSLRLSCAVSGFTFRSYGMSWVRQAPGKGLEWVALISSGGSYTYYTDSVKGRFTISRDNSKNTLYLQMNSLRAEDTAVYYCSRHGGNFFDYWGQGTTVTVSS

SEQ ID NO: 3236 - protein, 117 aa, Artificial Sequence
  source: /note="Description of Artificial Sequence: Synthetic polypeptide"
QVQLVESGGGVVQPGRSLRLSCAVSGFTFRSYGMSWVRQAPGKGLEWVALISSGGSYTYYTDSVKGRFTISRDNSKNTLYLQMSSLRAEDTAVYYCSRHGGNFFDYWGQGTTVTVSS

SEQ ID NO: 3237 - protein, 117 aa, Artificial Sequence
  source: /note="Description of Artificial Sequence: Synthetic polypeptide"
EVQLVESGGGLVQPGGSLRLSCPVSGFTFRSYGMSWVRQAPGKGLEWVALISSGGSYTYYTDSVKGRFTISRDNANNSLYLQMNSLRAEDTAVYYCSRHGGNFFDYWGQGTTVTVSS

SEQ ID NO: 3238 - protein, 117 aa, Artificial Sequence
  source: /note="Description of Artificial Sequence: Synthetic polypeptide"
EVQLVESGGGLVQPGRSLRLSCTVSGFTFRSYGMSWVRQAPGKGLEWVALISSGGSYTYYTDSVKGRFTISRDNSKNILYLQMNSLKTEDTAVYYCSRHGGNFFDYWGQGTTVTVSS

SEQ ID NO: 3239 - protein, 117 aa, Artificial Sequence
  source: /note="Description of Artificial Sequence: Synthetic polypeptide"
EVQLVESGGGLVQPGPSLRLSCTVSGFTFRSYGMSWVRQAPGKGLEWVALISSGGSYTYYTDSVKGRFTISRDNSKNILYLQMNSLKTEDTAVYYCSRHGGNFFDYWGQGTTVTVSS

SEQ ID NO: 3240 - protein, 117 aa, Artificial Sequence
  source: /note="Description of Artificial Sequence: Synthetic polypeptide"
EVQLVESGGGLVQPGGSLRLSCAVSGFTFRSYGMSWVRQAPGKGLEWVALISSGGSYTYYTDSVKGRFTISRDNSKNTLYLQMNSLRAEDTAVYYCSRHGGNFFDYWGQGTTVTVSS

SEQ ID NO: 3241 - protein, 117 aa, Artificial Sequence
  source: /note="Description of Artificial Sequence: Synthetic polypeptide"
EVQLVESGGGLVQPGGSLRLSCAVSGFTFRSYGMSWVRQAPGKGLEWVALISSGGSYTYYTDSVKGRFTISRDNAKNSLYLQMNSLRDEDTAVYYCSRHGGNFFDYWGQGTTVTVSS

SEQ ID NO: 3242 - protein, 117 aa, Artificial Sequence
  source: /note="Description of Artificial Sequence: Synthetic polypeptide"
QVQLVESGGGLVKPGGSLRLSCAVSGFTFRSYGMSWVRQAPGKGLEWVALISSGGSYTYYTDSVKGRFTISRDNAKNSLYLQMNSLRAEDTAVYYCSRHGGNFFDYWGQGTTVTVSS

SEQ ID NO: 3243 - protein, 117 aa, Artificial Sequence
  source: /note="Description of Artificial Sequence: Synthetic polypeptide"
QVQLVESGGGVVQPGRSLRLSCAVSGFTFRSYGMSWVRQAPGKGLEWVALISSGGSYTYYTDSVKGRFTISRDNSKNTLYLQMNSLRAEDTAVYYCSRHGGNFFDYWGQGTTVTVSS

SEQ ID NO: 3244 - protein, 117 aa, Artificial Sequence
  source: /note="Description of Artificial Sequence: Synthetic polypeptide"
EVQLLESGGGLVQPGGSLRLSCAVSGFTFRSYGMSWVRQAPGKGLEWVALISSGGSYTYYTDSVKGRFTISRDNSKNTLYLQMNSLRAEDTAVYYCSRHGGNFFDYWGQGTTVTVSS

SEQ ID NO: 3245 - protein, 117 aa, Artificial Sequence
  source: /note="Description of Artificial Sequence: Synthetic polypeptide"
EVQLVESGGGLVQPGGSLRLSCAVSGFTFRSYGMSWVRQAPGKGLEWVALISSGGSYTYYTDSVKGRFTISRHNSKNTLYLQMNSLRAEDTAVYYCSRHGGNFFDYWGQGTTVTVSS

SEQ ID NO: 3246 - protein, 117 aa, Artificial Sequence
  source: /note="Description of Artificial Sequence: Synthetic polypeptide"
EVQLVESGGGLIQPGGSLRLSCAVSGFTFRSYGMSWVRQPPGKGLEWVALISSGGSYTYYTDSVKGRFTISRDNSKNTLYLQMNSLRAEDTAVYYCSRHGGNFFDYWGQGTTVTVSS

SEQ ID NO: 3247 - protein, 117 aa, Artificial Sequence
  source: /note="Description of Artificial Sequence: Synthetic polypeptide"
EVQLVESGGGLIQPGGSLRLSCAVSGFTFRSYGMSWVRQAPGKGLEWVALISSGGSYTYYTDSVKGRFTISRDNSKNTLYLQMNSLRAEDTAVYYCSRHGGNFFDYWGQGTTVTVSS

SEQ ID NO: 3248 - protein, 117 aa, Artificial Sequence
  source: /note="Description of Artificial Sequence: Synthetic polypeptide"
EVQLVESGGGLVQPGRSLRLSCAVSGFTFRSYGMSWVRQAPGKGLEWVALISSGGSYTYYTDSVKGRFTISRDNAKNSLYLQMNSLRAEDTALYYCSRHGGNFFDYWGQGTTVTVSS

SEQ ID NO: 3249 - protein, 117 aa, Artificial Sequence
  source: /note="Description of Artificial Sequence: Synthetic polypeptide"
QVQLVESGGGVVQPGRSLRLSCAVSGFTFRSYGMSWVRQAPGKGLEWVALISSGGSYTYYTDSVKGRFTISRDNSKNRLYLQMNSLRAEDTAVYYCSRHGGNFFDYWGQGTTVTVSS

SEQ ID NO: 3250 - protein, 117 aa, Artificial Sequence
  source: /note="Description of Artificial Sequence: Synthetic polypeptide"
QVQLVESGGGVVQPGRSLRLSCAVSGFTFRSYGMSWVRQAPGKGLEWVALISSGGSYTYYTDSVKGRFTISRDNSKNTLYLQMNSLRAEGTAVYYCSRHGGNFFDYWGQGTTVTVSS

SEQ ID NO: 3251 - protein, 117 aa, Artificial Sequence
  source: /note="Description of Artificial Sequence: Synthetic polypeptide"
QVQLVESGGGVVQPGRSLRLSCAVSGFTFRSYGMSWVRQAPGKGLEWVALISSGGSYTYYTDSVKGRFAISRDNSKNTLYLQMNSLRAEDTAVYYCSRHGGNFFDYWGQGTTVTVSS

SEQ ID NO: 3252 - protein, 117 aa, Artificial Sequence
  source: /note="Description of Artificial Sequence: Synthetic polypeptide"
QVQLVDSGGGVVQPGRSLRLSCAVSGFTFRSYGMSWVRQAPGKGLEWVALISSGGSYTYYTDSVKGRFTISRDNSKNTLYLQMNSLRAEDTAVYYCSRHGGNFFDYWGQGTTVTVSS

SEQ ID NO: 3253 - protein, 117 aa, Artificial Sequence
  source: /note="Description of Artificial Sequence: Synthetic polypeptide"
EVQLVESGGGVVRPGGSLRLSCAVSGFTFRSYGMSWVRQAPGKGLEWVALISSGGSYTYYTDSVKGRFTISRDNAKNSLYLQMNSLRAEDTALYHCSRHGGNFFDYWGQGTTVTVSS

SEQ ID NO: 3254 - protein, 117 aa, Artificial Sequence
  source: /note="Description of Artificial Sequence: Synthetic polypeptide"
EVQLVESGGVVVQPGGSLRLSCAVSGFTFRSYGMSWVRQAPGKGLEWVALISSGGSYTYYTDSVKGRFTISRDNSKNSLYLQMNSLRAEDTALYYCSRHGGNFFDYWGQGTTVTVSS

SEQ ID NO: 3255 - protein, 117 aa, Artificial Sequence
  source: /note="Description of Artificial Sequence: Synthetic polypeptide"
EVQLVESGGGVVQPGGSLRLSCAVSGFTFRSYGMSWVRQAPGKGLEWVALISSGGSYTYYTDSVKGRFTISRDNSKNSLYLQMNSLRTEDTALYYCSRHGGNFFDYWGQGTTVTVSS

SEQ ID NO: 3256 - protein, 117 aa, Artificial Sequence
  source: /note="Description of Artificial Sequence: Synthetic polypeptide"
EVQLVESGGVVVQPGGSLRLSCAVSGFTFRSYGMSWVRQAPGKGLEWVALISSGGSYTYYTDSVKGRFTISRDNSKNSLYLQMNSLRTEDTALYYCSRHGGNFFDYWGQGTTVTVSS

SEQ ID NO: 3257 - protein, 117 aa, Artificial Sequence
  source: /note="Description of Artificial Sequence: Synthetic polypeptide"
EVQLVETGGGLIQPGGSLRLSCAVSGFTFRSYGMSWVRQAPGKGLEWVALISSGGSYTYYTDSVKGRFTISRDNSKNTLYLQMNSLRAEDTAVYYCSRHGGNFFDYWGQGTTVTVSS

SEQ ID NO: 3258 - protein, 117 aa, Artificial Sequence
  source: /note="Description of Artificial Sequence: Synthetic polypeptide"
EVQLVESGGGLVQPGGSLRLSCAVSGFTFRSYGMSWVRQATGKGLEWVALISSGGSYTYYTDSVKGRFTISRENAKNSLYLQMNSLRAGDTAVYYCSRHGGNFFDYWGQGTTVTVSS

SEQ ID NO: 3259 - protein, 117 aa, Artificial Sequence
  source: /note="Description of Artificial Sequence: Synthetic polypeptide"
EVQLVESRGVLVQPGGSLRLSCAVSGFTFRSYGMSWVRQAPGKGLEWVALISSGGSYTYYTDSVKGRFTISRDNSKNTLHLQMNSLRAEDTAVYYCSRHGGNFFDYWGQGTTVTVSS

SEQ ID NO: 3260 - protein, 117 aa, Artificial Sequence
  source: /note="Description of Artificial Sequence: Synthetic polypeptide"
EVQLVESGGGLVQPGRSLRLSCAVSGFTFRSYGMSWVRQAPGKGLEWVALISSGGSYTYYTDSVKGRFTISRDNAKNSLYLQMNSLRAEDMALYYCSRHGGNFFDYWGQGTTVTVSS

SEQ ID NO: 3261 - protein, 117 aa, Artificial Sequence
  source: /note="Description of Artificial Sequence: Synthetic polypeptide"
QVQLVESGGGLVQPGGSLRLSCSVSGFTFRSYGMSWVRQAPGKGLEWVALISSGGSYTYYTDSVKGRFTISRDNSKNTLYLQMNSLRAEDTAVYYCSRHGGNFFDYWGQGTTVTVSS

SEQ ID NO: 3262 - protein, 117 aa, Artificial Sequence
  source: /note="Description of Artificial Sequence: Synthetic polypeptide"
EVQLVESGGGLVQPGGSLRLSCSVSGFTFRSYGMSWVRQAPGKGLEWVALISSGGSYTYYTDSVKGRFTISRDNSKNTLYLQMSSLRAEDTAVYYCSRHGGNFFDYWGQGTTVTVSS

SEQ ID NO: 3263 - protein, 117 aa, Artificial Sequence
  source: /note="Description of Artificial Sequence: Synthetic polypeptide"
QVQLVESGGGVVQPGRSLRLSCAVSGFTFRSYGMSWVRQAPGKGLEWVALISSGGSYTYYTDSVKGRFTISRDNSTNTLFLQMNSLRAEDTAVYYCSRHGGNFFDYWGQGTTVTVSS

SEQ ID NO: 3264 - protein, 117 aa, Artificial Sequence
  source: /note="Description of Artificial Sequence: Synthetic polypeptide"
QVQLLESGGGLVKPGGSLRLSCAVSGFTFRSYGMSWVRQAPGKGLEWVALISSGGSYTYYTDSVKGRFTISRDNAKNSLYLQMNSLRAEDTAVYYCSRHGGNFFDYWGQGTTVTVSS

SEQ ID NO: 3265 - protein, 117 aa, Artificial Sequence
  source: /note="Description of Artificial Sequence: Synthetic polypeptide"
EVQLVESGEGLVQPGGSLRLSCAVSGFTFRSYGMSWVRQAPGKGLEWVALISSGGSYTYYTDSVKGRFTISRDNSKNTLYLQMGSLRAEDMAVYYCSRHGGNFFDYWGQGTTVTVSS

SEQ ID NO: 3266 - protein, 117 aa, Artificial Sequence
  source: /note="Description of Artificial Sequence: Synthetic polypeptide"
EVQLVESGGGLVQPGGSLRLSCAVSGFTFRSYGMSWVRQAPGKGLEWVALISSGGSYTYYTDSVKGRFTISRDNSKNTLYLQMGSLRAEDMAVYYCSRHGGNFFDYWGQGTTVTVSS

SEQ ID NO: 3267 - protein, 117 aa, Artificial Sequence
  source: /note="Description of Artificial Sequence: Synthetic polypeptide"
EVQLVESGGGLVQPGGSLRLSCSVSGFTFRSYGMSWVRQAPGKGLEWVALISSGGSYTYYTDSVKGRFTISRDNSKNTLYVQMSSLRAEDTAVYYCSRHGGNFFDYWGQGTTVTVSS

SEQ ID NO: 3268 - protein, 117 aa, Artificial Sequence
  source: /note="Description of Artificial Sequence: Synthetic polypeptide"
EVQLVESGGGLVQPGGSLRLSCAVSGFTFRSYGMSWVRQAPGKGLEWVALISSGGSYTYYTDSVKGRFIISRDNSRNSLYLQKNRRRAEDMAVYYCSRHGGNFFDYWGQGTTVTVSS

SEQ ID NO: 3269 - protein, 117 aa, Artificial Sequence
  source: /note="Description of Artificial Sequence: Synthetic polypeptide"
EVQLVESGGGLVQPGGSLRLSCAVSGFTFRSYGMSWVHQAPGKGLEWVALISSGGSYTYYTDSVKGRFIISRDNSRNTLYLQTNSLRAEDTAVYYCSRHGGNFFDYWGQGTTVTVSS

SEQ ID NO: 3270 - protein, 117 aa, Artificial Sequence
  source: /note="Description of Artificial Sequence: Synthetic polypeptide"
EVHLVESGGGLVQPGGALRLSCAVSGFTFRSYGMSWVRQATGKGLEWVALISSGGSYTYYTDSVKGRFTISRENAKNSLYLQMNSLRAGDTAVYYCSRHGGNFFDYWGQGTTVTVSS

SEQ ID NO: 3271 - protein, 117 aa, Artificial Sequence
  source: /note="Description of Artificial Sequence: Synthetic polypeptide"
EVQLVESGGGLVQPRGSLRLSCAVSGFTFRSYGMSWVRQAPGKGLEWVALISSGGSYTYYTDSVKGRFTISRDNSKNTLYLQMNNLRAEGTAVYYCSRHGGNFFDYWGQGTTVTVSS

SEQ ID NO: 3272 - protein, 117 aa, Artificial Sequence
  source: /note="Description of Artificial Sequence: Synthetic polypeptide"
EVQLVESGGGLVQPRGSLRLSCAVSGFTFRSYGMSWVRQAPGKGLEWVALISSGGSYTYYTDSVKGRFTISRDNSKNTLYLQMNNLRAEGTAAYYCSRHGGNFFDYWGQGTTVTVSS

SEQ ID NO: 3273 - protein, 117 aa, Artificial Sequence
  source: /note="Description of Artificial Sequence: Synthetic polypeptide"
QVQLVQSGAEVKKPGASVKVSCKVSGFTFRSYGMSWVRQAPGKGLEWVALISSGGSYTYYTDSVKGRFTITRDNSTNTLYMELSSLRSEDTAVYYCSRHGGNFFDYWGQGTTVTVSS

SEQ ID NO: 3274 - protein, 117 aa, Artificial Sequence
  source: /note="Description of Artificial Sequence: Synthetic polypeptide"
QVQLVQSGSELKKPGASVKVSCKVSGFTFRSYGMSWVRQAPGQGLEWVALISSGGSYTYYTDSVKGRFVISRDNSVNTLYLQISSLKAEDTAVYYCSRHGGNFFDYWGQGTTVTVSS

SEQ ID NO: 3275-3277 - skipped (3 entries)

SEQ ID NO: 3278 - protein, 469 aa, Artificial Sequence
  source: /note="Description of Artificial Sequence: Synthetic polypeptide"
METDTLLLWVLLLWVPGSTGQVQLVQSGAEVKKPGSSVKVSCKASGYSFTTYYIHWVRQAPGQGLEWMGWFFPGSGNIKYNEKFKGRVTITADTSTSTAYMELSSLRSEDTAVYYCAGSYYSYDVLDYWGQGTTVTVSSASTKGPSVFPLAPSSKSTSGGTAALGCLVKDYFPEPVTVSWNSGALTSGVHTFPAVLQSSGLYSLSSVVTVPSSSLGTQTYICNVNHKPSNTKVDKRVEPKSCDKTHTCPPCPAPELLGGPSVFLFPPKPKDTLMISRTPEVTCVVVDVSHEDPEVKFNWYVDGVEVHNAKTKPREEQYNSTYRVVSVLTVLHQDWLNGKEYKCKVSNKALPAPIEKTISKAKGQPREPQVYTLPPSREEMTKNQVSLTCLVKGFYPSDIAVEWESNGQPENNYKTTPPVLDSDGSFFLYSKLTVDKSRWQQGNVFSCSVMHEALHNHYTQKSLSLSPGK

SEQ ID NO: 3279 - protein, 234 aa, Artificial Sequence
  source: /note="Description of Artificial Sequence: Synthetic polypeptide"
METDTLLLWVLLLWVPGSTGDIQMTQSPSSLSASVGDRVTITCKASQNVGINVVWHQQKPGKVPKALIYSSSHRYSGVPSRFSGSGSGTDFTLTISSLQPEDVATYFCQQFKSYPLTFGQGTKLEIKRTVAAPSVFIFPPSDEQLKSGTASVVCLLNNFYPREAKVQWKVDNALQSGNSQESVTEQDSKDSTYSLSSTLTLSKADYEKHKVYACEVTHQGLSSPVTKSFNRGEC

SEQ ID NO: 3280 - protein, 247 aa, Artificial Sequence
  source: /note="Description of Artificial Sequence: Synthetic polypeptide"
METDTLLLWVLLLWVPGSTGDKTHTCPPCPAPELLGGPSVFLFPPKPKDTLMISRTPEVTCVVVDVSHEDPEVKFNWYVDGVEVHNAKTKPREEQYNSTYRVVSVLTVLHQDWLNGKEYKCKVSNKALPAPIEKTISKAKGQPREPQVYTLPPCREEMTKNQVSLWCLVKGFYPSDIAVEWESNGQPENNYKTTPPVLDSDGSFFLYSKLTVDKSRWQQGNVFSCSVMHEALHNRFTQKSLSLSPGK

SEQ ID NO: 3281 - protein, 520 aa, Artificial Sequence
  source: /note="Description of Artificial Sequence: Synthetic polypeptide"
METDTLLLWVLLLWVPGSTGEVQLVESGGGLVQPGGSLRLSCAASGFTFSNFGMHWVRQAPGKGLEWVSYISSGSSTIYYADTLKGRFTISRDNSKNTLYLQMNSLRAEDTAVYYCARRGEGAMDYWGQGTTVTVSSGGGGSGGGGSGGGGSGGGGSDNQLTQSPSFLSASVGDRVTITCRASSSVNYIYWYQQKPGKAPKLLIYYTSNLAPGVPSRFSGSGSGNEYTLTISSLQPEDFATYYCQQFTSSPFTFGQGTKLEIKGGGGSDKTHTCPPCPAPELLGGPSVFLFPPKPKDTLMISRTPEVTCVVVDVSHEDPEVKFNWYVDGVEVHNAKTKPREEQYNSTYRVVSVLTVLHQDWLNGKEYKCKVSNKALPAPIEKTISKAKGQPREPQVCTLPPSREEMTKNQVSLSCAVKGFYPSDIAVEWESNGQPENNYKTTPPVLDSDGSFFLVSKLTVDKSRWQQGNVFSCSVMHEALHNHYTQKSLSLSPGKGGGGSGGGGSGLNDIFEAQKIEWHE

SEQ ID NO: 3282 - protein, 284 aa, Artificial Sequence
  source: /note="Description of Artificial Sequence: Synthetic polypeptide"
METDTLLLWVLLLWVPGSTGGLNDIFEAQKIEWHEGGGGSEPRTDTDTCPNPPDPCPTCPTPDLLGGPSVFIFPPKPKDVLMISLTPKITCVVVDVSEEEPDVQFNWYVNNVEDKTAQTETRQRQYNSTYRVVSVLPIKHQDWMSGKVFKCKVNNNALPSPIEKTISKPRGQVRVPQIYTFPPPIEQTVKKDVSVTCLVTGFLPQDIHVEWESNGQPQPEQNYKNTQPVLDSDGSYFLYSKLNVPKSRWDQGDSFTCSVIHEALHNHHMTKTISRSLGNGGGGS

SEQ ID NO: 3283 - skipped

SEQ ID NO: 3284 - protein, 469 aa, Artificial Sequence
  source: /note="Description of Artificial Sequence: Synthetic polypeptide"
METDTLLLWVLLLWVPGSTGQVQLQQSGPELVKPGASVKISCKASGYAFSSSWMNWVKQRPGQGLEWIGRIYPGDGDTKYNGKFKGKATLTADKSSSTAYMHLSSLTSVDSAVYFCARRGTGGWYFDVWGAGTTVTVSSAKTTAPSVYPLAPVCGDTTGSSVTLGCLVKGYFPEPVTLTWNSGSLSSGVHTFPAVLQSDLYTLSSSVTVTSSTWPSQSITCNVAHPASSTKVDKKIEPRGPTIKPCPPCKCPAPNLLGGPSVFIFPPKIKDVLMISLSPIVTCVVVDVSEDDPDVQISWFVNNVEVHTAQTQTHREDYNSTLRVVSALPIQHQDWMSGKEFKCKVNNKDLPAPIERTISKPKGSVRAPQVYVLPPPEEEMTKKQVTLTCMVTDFMPEDIYVEWTNNGKTELNYKNTEPVLDSDGSYFMYSKLRVEKKNWVERNSYSCSVVHEGLHNHHTTKSFSRTPGK

SEQ ID NO: 3285 - protein, 238 aa, Artificial Sequence
  source: /note="Description of Artificial Sequence: Synthetic polypeptide"
METDTLLLWVLLLWVPGSTGDIVLTQSPASLAVSLGQRATISCRASESVDSSGNSFMHWYQQKPGQPPQLLIYRASNLESGIPARFSGSGSRTDFTLTINPVEADDVATFYCQQSFDDPFTFGSGTKLEIKRADAAPTVSIFPPSSEQLTSGGASVVCFLNNFYPKDINVKWKIDGSERQNGVLNSWTDQDSKDSTYSMSSTLTLTKDEYERHNSYTCEATHKTSTSPIVKSFNRNEC

SEQ ID NO: 3286-3288 - skipped (3 entries)

SEQ ID NO: 3289 - protein, 107 aa, Artificial Sequence; identical to SEQ ID NO: 108
  source: /note="Description of Artificial Sequence: Synthetic polypeptide"
  VARIANT (30)..(30): /replace="Glu" or "Ala" or "Asp"
  VARIANT (31)..(31): /replace="Asp"
  VARIANT (32)..(32): /replace="Lys"
  VARIANT (36)..(36): /replace="His"
  VARIANT (56)..(56): /replace="Ser"
  SITE (1)..(107): /note="Variant residues given in the sequence have no preference with respect to those in the annotations for variant positions"

SEQ ID NO: 3290 - protein, 119 aa, Artificial Sequence; identical to SEQ ID NO: 148
  source: /note="Description of Artificial Sequence: Synthetic polypeptide"
  VARIANT (27)..(27): /replace="Thr" or "Gly" or "Tyr"
  VARIANT (28)..(28): /replace="Thr" or "Ser"
  VARIANT (30)..(30): /replace="Arg" or "Asp" or "Lys" or "Thr"
  VARIANT (31)..(31): /replace="Asp" or "Lys" or "Thr" or "Asn"
  VARIANT (32)..(32): /replace="Phe" or "Thr" or "Ile" or "Tyr" or "Gly"
  VARIANT (50)..(50): /replace="Trp"
  VARIANT (51)..(51): /replace="Ile" or "Phe"
  VARIANT (52)..(52): /replace="Ser" or "Tyr"
  VARIANT (53)..(53): /replace="Pro"
  VARIANT (57)..(57): /replace="Ser"
  VARIANT (58)..(58): /replace="Val" or "Tyr" or "Ile"
  VARIANT (59)..(59): /replace="Arg"
  VARIANT (98)..(98): /replace="Val"
  VARIANT (100)..(100): /replace="Ile"
  VARIANT (103)..(103): /replace="Ala"
  VARIANT (104)..(104): /replace="Gly"
  SITE (1)..(119): /note="Variant residues given in the sequence have no preference with respect to those in the annotations for variant positions"

SEQ ID NO: 3291-3376 - skipped (86 entries)

SEQ ID NO: 3377 - protein, 107 aa, Artificial Sequence; identical to SEQ ID NO: 93
  source: /note="Description of Artificial Sequence: Synthetic polypeptide"

SEQ ID NO: 3378 - protein, 107 aa, Artificial Sequence; identical to SEQ ID NO: 117
  source: /note="Description of Artificial Sequence: Synthetic polypeptide"

SEQ ID NO: 3379 - protein, 107 aa, Artificial Sequence; identical to SEQ ID NO: 199
  source: /note="Description of Artificial Sequence: Synthetic polypeptide"

SEQ ID NO: 3380 - protein, 107 aa, Artificial Sequence; identical to SEQ ID NO: 181
  source: /note="Description of Artificial Sequence: Synthetic polypeptide"

SEQ ID NO: 3381 - protein, 107 aa, Artificial Sequence; identical to SEQ ID NO: 87
  source: /note="Description of Artificial Sequence: Synthetic polypeptide"

SEQ ID NO: 3382 - protein, 107 aa, Artificial Sequence; identical to SEQ ID NO: 160
  source: /note="Description of Artificial Sequence: Synthetic polypeptide"

SEQ ID NO: 3383 - protein, 107 aa, Artificial Sequence; identical to SEQ ID NO: 147
  source: /note="Description of Artificial Sequence: Synthetic polypeptide"

SEQ ID NO: 3384 - protein, 107 aa, Artificial Sequence; identical to SEQ ID NO: 141
  source: /note="Description of Artificial Sequence: Synthetic polypeptide"

SEQ ID NO: 3385 - protein, 107 aa, Artificial Sequence; identical to SEQ ID NO: 81
  source: /note="Description of Artificial Sequence: Synthetic polypeptide"

SEQ ID NO: 3386 - protein, 107 aa, Artificial Sequence; identical to SEQ ID NO: 90
  source: /note="Description of Artificial Sequence: Synthetic polypeptide"

SEQ ID NO: 3387 - protein, 107 aa, Artificial Sequence; identical to SEQ ID NO: 102
  source: /note="Description of Artificial Sequence: Synthetic polypeptide"

SEQ ID NO: 3388 - protein, 107 aa, Artificial Sequence; identical to SEQ ID NO: 99
  source: /note="Description of Artificial Sequence: Synthetic polypeptide"

SEQ ID NO: 3389 - protein, 107 aa, Artificial Sequence; identical to SEQ ID NO: 108
  source: /note="Description of Artificial Sequence: Synthetic polypeptide"

SEQ ID NO: 3390 - protein, 119 aa, Artificial Sequence; identical to SEQ ID NO: 221
  source: /note="Description of Artificial Sequence: Synthetic polypeptide"

SEQ ID NO: 3391 - protein, 119 aa, Artificial Sequence; identical to SEQ ID NO: 223
  source: /note="Description of Artificial Sequence: Synthetic polypeptide"

SEQ ID NO: 3392 - protein, 119 aa, Artificial Sequence; identical to SEQ ID NO: 225
  source: /note="Description of Artificial Sequence: Synthetic polypeptide"

SEQ ID NO: 3393 - protein, 119 aa, Artificial Sequence; identical to SEQ ID NO: 219
  source: /note="Description of Artificial Sequence: Synthetic polypeptide"

SEQ ID NO: 3394 - protein, 119 aa, Artificial Sequence; identical to SEQ ID NO: 217
  source: /note="Description of Artificial Sequence: Synthetic polypeptide"

SEQ ID NO: 3395 - protein, 119 aa, Artificial Sequence; identical to SEQ ID NO: 211
  source: /note="Description of Artificial Sequence: Synthetic polypeptide"

SEQ ID NO: 3396 - protein, 119 aa, Artificial Sequence; identical to SEQ ID NO: 215
  source: /note="Description of Artificial Sequence: Synthetic polypeptide"

SEQ ID NO: 3397 - protein, 119 aa, Artificial Sequence; identical to SEQ ID NO: 213
  source: /note="Description of Artificial Sequence: Synthetic polypeptide"

SEQ ID NO: 3398 - protein, 119 aa, Artificial Sequence; identical to SEQ ID NO: 207
  source: /note="Description of Artificial Sequence: Synthetic polypeptide"

SEQ ID NO: 3399 - protein, 119 aa, Artificial Sequence; identical to SEQ ID NO: 209
  source: /note="Description of Artificial Sequence: Synthetic polypeptide"

SEQ ID NO: 3400 - protein, 119 aa, Artificial Sequence; identical to SEQ ID NO: 121
  source: /note="Description of Artificial Sequence: Synthetic polypeptide"

SEQ ID NO: 3401 - protein, 119 aa, Artificial Sequence; identical to SEQ ID NO: 182
  source: /note="Description of Artificial Sequence: Synthetic polypeptide"

SEQ ID NO: 3402 - protein, 119 aa, Artificial Sequence; identical to SEQ ID NO: 176
  source: /note="Description of Artificial Sequence: Synthetic polypeptide"

SEQ ID NO: 3403 - protein, 119 aa, Artificial Sequence; identical to SEQ ID NO: 158
  source: /note="Description of Artificial Sequence: Synthetic polypeptide"

SEQ ID NO: 3404 - protein, 119 aa, Artificial Sequence; identical to SEQ ID NO: 155
  source: /note="Description of Artificial Sequence: Synthetic polypeptide"

SEQ ID NO: 3405 - protein, 119 aa, Artificial Sequence; identical to SEQ ID NO: 118
  source: /note="Description of Artificial Sequence: Synthetic polypeptide"

SEQ ID NO: 3406 - protein, 119 aa, Artificial Sequence; identical to SEQ ID NO: 82
  source: /note="Description of Artificial Sequence: Synthetic polypeptide"

SEQ ID NO: 3407 - protein, 119 aa, Artificial Sequence; identical to SEQ ID NO: 106
  source: /note="Description of Artificial Sequence: Synthetic polypeptide"

SEQ ID NO: 3408 - protein, 119 aa, Artificial Sequence; identical to SEQ ID NO: 200
  source: /note="Description of Artificial Sequence: Synthetic polypeptide"

SEQ ID NO: 3409 - protein, 119 aa, Artificial Sequence; identical to SEQ ID NO: 124
  source: /note="Description of Artificial Sequence: Synthetic polypeptide"

SEQ ID NO: 3410 - protein, 119 aa, Artificial Sequence; identical to SEQ ID NO: 94
  source: /note="Description of Artificial Sequence: Synthetic polypeptide"

SEQ ID NO: 3411 - protein, 119 aa, Artificial Sequence; identical to SEQ ID NO: 151
  source: /note="Description of Artificial Sequence: Synthetic polypeptide"

SEQ ID NO: 3412 - protein, 119 aa, Artificial Sequence; identical to SEQ ID NO: 197
  source: /note="Description of Artificial Sequence: Synthetic polypeptide"

SEQ ID NO: 3413 - protein, 119 aa, Artificial Sequence; identical to SEQ ID NO: 130
  source: /note="Description of Artificial Sequence: Synthetic polypeptide"

SEQ ID NO: 3414 - protein, 119 aa, Artificial Sequence; identical to SEQ ID NO: 173
  source: /note="Description of Artificial Sequence: Synthetic polypeptide"

SEQ ID NO: 3415 - protein, 119 aa, Artificial Sequence; identical to SEQ ID NO: 142
  source: /note="Description of Artificial Sequence: Synthetic polypeptide"

SEQ ID NO: 3416 - protein, 119 aa, Artificial Sequence; identical to SEQ ID NO: 91
  source: /note="Description of Artificial Sequence: Synthetic polypeptide"

SEQ ID NO: 3417 - protein, 119 aa, Artificial Sequence; identical to SEQ ID NO: 139
  source: /note="Description of Artificial Sequence: Synthetic polypeptide"

SEQ ID NO: 3418 - protein, 119 aa, Artificial Sequence; identical to SEQ ID NO: 185
  source: /note="Description of Artificial Sequence: Synthetic polypeptide"

SEQ ID NO: 3419 - protein, 119 aa, Artificial Sequence; identical to SEQ ID NO: 133
  source: /note="Description of Artificial Sequence: Synthetic polypeptide"

SEQ ID NO: 3420 - protein, 119 aa, Artificial Sequence; identical to SEQ ID NO: 188
  source: /note="Description of Artificial Sequence: Synthetic polypeptide"

SEQ ID NO: 3421 - protein, 119 aa, Artificial Sequence; identical to SEQ ID NO: 109
  source: /note="Description of Artificial Sequence: Synthetic polypeptide"

SEQ ID NO: 3422 - protein, 119 aa, Artificial Sequence; identical to SEQ ID NO: 97
  source: /note="Description of Artificial Sequence: Synthetic polypeptide"

SEQ ID NO: 3423 - protein, 119 aa, Artificial Sequence; identical to SEQ ID NO: 85
  source: /note="Description of Artificial Sequence: Synthetic polypeptide"

SEQ ID NO: 3424 - protein, 119 aa, Artificial Sequence; identical to SEQ ID NO: 115
  source: /note="Description of Artificial Sequence: Synthetic polypeptide"

SEQ ID NO: 3425 - protein, 119 aa, Artificial Sequence; identical to SEQ ID NO: 191
  source: /note="Description of Artificial Sequence: Synthetic polypeptide"

SEQ ID NO: 3426 - protein, 119 aa, Artificial Sequence; identical to SEQ ID NO: 136
  source: /note="Description of Artificial Sequence: Synthetic polypeptide"

SEQ ID NO: 3427 - protein, 119 aa, Artificial Sequence; identical to SEQ ID NO: 203
  source: /note="Description of Artificial Sequence: Synthetic polypeptide"

SEQ ID NO: 3428 - protein, 119 aa, Artificial Sequence; identical to SEQ ID NO: 103
  source: /note="Description of Artificial Sequence: Synthetic polypeptide"

SEQ ID NO: 3429 - protein, 119 aa, Artificial Sequence; identical to SEQ ID NO: 205
  source: /note="Description of Artificial Sequence: Synthetic polypeptide"

SEQ ID NO: 3430 - protein, 119 aa, Artificial Sequence; identical to SEQ ID NO: 100
  source: /note="Description of Artificial Sequence: Synthetic polypeptide"

SEQ ID NO: 3431 - protein, 119 aa, Artificial Sequence; identical to SEQ ID NO: 179
  source: /note="Description of Artificial Sequence: Synthetic polypeptide"

SEQ ID NO: 3432 - protein, 119 aa, Artificial Sequence; identical to SEQ ID NO: 88
  source: /note="Description of Artificial Sequence: Synthetic polypeptide"

SEQ ID NO: 3433 - protein, 119 aa, Artificial Sequence; identical to SEQ ID NO: 167
  source: /note="Description of Artificial Sequence: Synthetic polypeptide"

SEQ ID NO: 3434 - protein, 119 aa, Artificial Sequence; identical to SEQ ID NO: 161
  source: /note="Description of Artificial Sequence: Synthetic polypeptide"

SEQ ID NO: 3435 - protein, 119 aa, Artificial Sequence; identical to SEQ ID NO: 145
  source: /note="Description of Artificial Sequence: Synthetic polypeptide"

SEQ ID NO: 3436 - protein, 119 aa, Artificial Sequence; identical to SEQ ID NO: 148
  source: /note="Description of Artificial Sequence: Synthetic polypeptide"

SEQ ID NO: 3437 - protein, 114 aa, Artificial Sequence
  source: /note="Description of Artificial Sequence: Synthetic polypeptide"
NWVNVISDLKKIEDLIQSMHIDATLYTESDVHPSCKVTAMKCFLLELQVISLESGDASIHDTVENLIILANNSLSSNGNVTESGCKECEELEEKNIKEFLQSFVHIVQMFINTS

SEQ ID NO: 3438 - protein, 77 aa, Artificial Sequence
  source: /note="Description of Artificial Sequence: Synthetic polypeptide"
MAPRRARGCRTLGLPALLLLLLLRPPATRGITCPPPMSVEHADIWVKSYSLYSRERYICNSGFKRKAGTSSLTECVL

SEQ ID NO: 3439 - protein, 20 aa, Artificial Sequence
  source: /note="Description of Artificial Sequence: Synthetic peptide"
SGGSGGGGSGGGSGGGGSLQ

SEQ ID NO: 3440 - protein, 133 aa, Artificial Sequence [sequence omitted]

SEQ ID NO: 3441 - protein, 157 aa, Artificial Sequence
  source: /note="Description of Artificial Sequence: Synthetic polypeptide"
YFGKLESKLSVIRNLNDQVLFIDQGNRPLFEDMTDSDCRDNAPRTIFIISMYKDSQPRGMAVTISVKCEKISTLSCENKIISFKEMNPPDNIKDTKSDIIFFQRSVPGHDNKMQFESSSYEGYFLACEKERDLFKLILKKEDELGDRSIMFTVQNED

SEQ ID NO: 3442 - protein, 133 aa, Artificial Sequence [sequence omitted]

SEQ ID NO: 3443 - protein, 138 aa, Artificial Sequence
  source: /note="Description of Artificial Sequence: Synthetic polypeptide"
QDPYVKEAENLKKYFNAGHSDVADNGTLFLGILKNWKEESDRKIMQSQIVSFYFKLFKNFKDDQSIQKSVETIKEDMNVKFFNSNKKKRDDFEKLTNYSVTDLNVQRKAIHELIQVMAELSPAAKTGKRKRSQMLFRG

SEQ ID NO: 3444 - protein, 238 aa, Artificial Sequence
  source: /note="Description of Artificial Sequence: Synthetic polypeptide"
DLKVEMMAGGTQITPLNDNVTIFCNIFYSQPLNITSMGITWFWKSLTFDKEVKVFEFFGDHQEAFRPGAIVSPWRLKSGDASLRLPGIQLEEAGEYRCEVVVTPLKAQGTVQLEVVASPASRLLLDQVGMKENEDKYMCESSGFYPEAINITWEKQTQKFPHPIEISEDVITGPTIKNMDGTFNVTSCLKLNSSQEDPGTVYQCVVRHASLHTPLRSNFTLTAARHSLSETEKTDNFS

SEQ ID NO: 3445 - protein, 284 aa, Artificial Sequence
  source: /note="Description of Artificial Sequence: Synthetic polypeptide"
EPHSLRYNLTVLSWDGSVQSGFLTEVHLDGQPFLRCDRQKCRAKPQGQWAEDVLGNKTWDRETRDLTGNGKDLRMTLAHIKDQKEGLHSLQEIRVCEIHEDNSTRSSQHFYYDGELFLSQNLETKEWTMPQSSRAQTLAMNVRNFLKEDAMKTKTHYHAMHADCLQELRRYLKSGVVLRRTVPPMVNVTRSEASEGNITVTCRASGFYPWNITLSWRQDGVSLSHDTQQWGDVLPDGNGTYQTWVATRICQGEEQRFTCYMEHSGNHSTHPVPSGKVLVLQSHW

SEQ ID NO: 3446 - protein, 287 aa, Artificial Sequence
  source: /note="Description of Artificial Sequence: Synthetic polypeptide"
AEPHSLRYNLMVLSQDESVQSGFLAEGHLDGQPFLRYDRQKRRAKPQGQWAEDVLGAKTWDTETEDLTENGQDLRRTLTHIKDQKGGLHSLQEIRVCEIHEDSSTRGSRHFYYDGELFLSQNLETQESTVPQSSRAQTLAMNVTNFWKEDAMKTKTHYRAMQADCLQKLQRYLKSGVAIRRTVPPMVNVTCSEVSEGNITVTCRASSFYPRNITLTWRQDGVSLSHNTQQWGDVLPDGNGTYQTWVATRIRQGEEQRFTCYMEHSGNHGTHPVPSGKVLVLQSQRTD

SEQ ID NO: 3447 - protein, 191 aa, Artificial Sequence
  source: /note="Description of Artificial Sequence: Synthetic polypeptide"
GWVDTHCLCYDFIITPKSRPEPQWCEVQGLVDERPFLHYDCVNHKAKAFASLGKKVNVTKTWEEQTETLRDVVDFLKGQLLDIQVENLIPIEPLTLQARMSCEHEAHGHGRGSWQFLFNGQKFLLFDSNNRKWTALHPGAKKMTEKWEKNRDVTMFFQKISLGDCKMWLEEFLMYWEQMLDPTKPPSLAPG

SEQ ID NO: 3448 - protein, 329 aa, Artificial Sequence
  source: /note="Description of Artificial Sequence: Synthetic polypeptide"
QDVRVQVLPEVRGQLGGTVELPCHLLPPVPGLYISLVTWQRPDAPANHQNVAAFHPKMGPSFPSPKPGSERLSFVSAKQSTGQDTEAELQDATLALHGLTVEDEGNYTCEFATFPKGSVRGMTWLRVIAKPKNQAEAQKVTFSQDPTTVALCISKEGRPPARISWLSSLDWEAKETQVSGTLAGTVTVTSRFTLVPSGRADGVTVTCKVEHESFEEPALIPVTLSVRYPPEVSISGYDDNWYLGRTDATLSCDVRSNPEPTGYDWSTTSGTFPTSAVAQGSQLVIHAVDSLFNTTFVCTVTNAVGMGRAEQVIFVRETPNTAGAGATGG

SEQ ID NO: 3449 - protein, 323 aa, Artificial Sequence
  source: /note="Description of Artificial Sequence: Synthetic polypeptide"
WPPPGTGDVVVQAPTQVPGFLGDSVTLPCYLQVPNMEVTHVSQLTWARHGESGSMAVFHQTQGPSYSESKRLEFVAARLGAELRNASLRMFGLRVEDEGNYTCLFVTFPQGSRSVDIWLRVLAKPQNTAEVQKVQLTGEPVPMARCVSTGGRPPAQITWHSDLGGMPNTSQVPGFLSGTVTVTSLWILVPSSQVDGKNVTCKVEHESFEKPQLLTVNLTVYYPPEVSISGYDNNWYLGQNEATLTCDARSNPEPTGYNWSTTMGPLPPFAVAQGAQLLIRPVDKPINTTLICNVTNALGARQAELTVQVKEGPPSEHSGISRN

SEQ ID NO: 3450 - protein, 330 aa, Artificial Sequence
  source: /note="Description of Artificial Sequence: Synthetic polypeptide"
QNLFTKDVTVIEGEVATISCQVNKSDDSVIQLLNPNRQTIYFRDFRPLKDSRFQLLNFSSSELKVSLTNVSISDEGRYFCQLYTDPPQESYTTITVLVPPRNLMIDIQKDTAVEGEEIEVNCTAMASKPATTIRWFKGNTELKGKSEVEEWSDMYTVTSQLMLKVHKEDDGVPVICQVEHPAVTGNLQTQRYLEVQYKPQVHIQMTYPLQGLTREGDALELTCEAIGKPQPVMVTWVRVDDEMPQHAVLSGPNLFINNLNKTDNGTYRCEASNIVGKAHSDYMLYVYDPPTTIPPPTTTTTTTTTTTTTILTIITDSRAGEEGSIRAVDH

SEQ ID NO: 3451 - protein, 155 aa, Artificial Sequence
  source: /note="Description of Artificial Sequence: Synthetic polypeptide"
QRFAQAQQQLPLESLGWDVAELQLNHTGPQQDPRLYWQGGPALGRSFLHGPELDKGQLRIHRDGIYMVHIQVTLAICSSTTASRHHPTTLAVGICSPASRSISLLRLSFHQGCTIASQRLTPLARGDTLCTNLTGTLLPSRNTDETFFGVQWVRP

SEQ ID NO: 3452 - protein, 294 aa, Artificial Sequence
  source: /note="Description of Artificial Sequence: Synthetic polypeptide"
WTYHYSEKPMNWQRARRFCRDNYTDLVAIQNKAEIEYLEKTLPFSRSYYWIGIRKIGGIWTWVGTNKSLTEEAENWGDGEPNNKKNKEDCVEIYIKRNKDAGKWNDDACHKLKAALCYTASCQPWSCSGHGECVEIINNYTCNCDVGYYGPQCQFVIQCEPLEAPELGTMDCTHPLGNFSFSSQCAFSCSEGTNLTGIEETTCGPFGNWSSPEPTCQVIQCEPLSAPDLGIMNCSHPLASFSFTSACTFICSEGTELIGKKKTICESSGIWSNPSPICQKLDKSFSMIKEGDYN

SEQ ID NO: 3453 - protein, 243 aa, Artificial Sequence
  source: /note="Description of Artificial Sequence: Synthetic polypeptide"
RYLQVSQQLQQTNRVLEVTNSSLRQQLRLKITQLGQSAEDLQGSRRELAQSQEALQVEQRAHQAAEGQLQACQADRQKTKETLQSEEQQRRALEQKLSNMENRLKPFFTCGSADTCCPSGWIMHQKSCFYISLTSKNWQESQKQCETLSSKLATFSEIYPQSHSYYFLNSLLPNGGSGNSYWTGLSSNKDWKLTDDTQRTRTYAQSSKCNKVHKTWSWWTLESESCRSSLPYICEMTAFRFPD

SEQ ID NO: 3454 - protein, 124 aa, Artificial Sequence
  source: /note="Description of Artificial Sequence: Synthetic polypeptide"
KLTRDSQSLCPYDWIGFQNKCYYFSKEEGDWNSSKYNCSTQHADLTIIDNIEEMNFLRRYKCSSDHWIGLKMAKNRTGQWVDGATFTKSFGMRGSEGCAYLSDDGAATARCYTERKWICRKRIH

SEQ ID NO: 3455 - protein, 194 aa, Artificial Sequence
  source: /note="Description of Artificial Sequence: Synthetic polypeptide"
QGHLVHMTVVSGSNVTLNISESLPENYKQLTWFYTFDQKIVEWDSRKSKYFESKFKGRVRLDPQSGALYISKVQKEDNSTYIMRVLKKTGNEQEWKIKLQVLDPVPKPVIKIEKIEDMDDNCYLKLSCVIPGESVNYTWYGDKRPFPKELQNSVLETTLMPHNYSRCYTCQVSNSVSSKNGTVCLSPPCTLARS

SEQ ID NO: 3456 - protein, 133 aa, Artificial Sequence
  source: /note="Description of Artificial Sequence: Synthetic polypeptide"
QVSHRYPRIQSIKVQFTEYKKEKGFILTSQKEDEIMKVQNNSVIINCDGFYLISLKGYFSQEVNISLHYQKDEEPLFQLKKVRSVNSLMVASLTYKDKVYLNVTTDNTSLDDFHVNGGELILIHQNPGEFCVL

SEQ ID NO: 3457 - protein, 149 aa, Artificial Sequence
  source: /note="Description of Artificial Sequence: Synthetic polypeptide"
MQKGDQNPQIAAHVISEASSKTTSVLQWAEKGYYTMSNNLVTLENGKQLTVKRQGLYYIYAQVTFCSNREASSQAPFIASLCLKSPGRFERILLRAANTHSSAKPCGQQSIHLGGVFELQPGASVFVNVTDPSQVSHGTGFTSFGLLKL

SEQ ID NO: 3458 - protein, 205 aa, Artificial Sequence
  source: /note="Description of Artificial Sequence: Synthetic polypeptide"
ACPWAVSGARASPGSAASPRLREGPELSPDDPAGLLDLRQGMFAQLVAQNVLLIDGPLSWYSDPGLAGVSLTGGLSYKEDTKELVVAKAGVYYVFFQLELRRVVAGEGSGSVSLALHLQPLRSAAGAAALALTVDLPPASSEARNSAFGFQGRLLHLSAGQRLGVHLHTEARARHAWQLTQGATVLGLFRVTPEIPAGLPSPRSE

SEQ ID NO: 3459 - protein, 455 aa, Artificial Sequence
  source: /note="Description of Artificial Sequence: Synthetic polypeptide"
LNFRAPPVIPNVPFLWAWNAPSEFCLGKFDEPLDMSLFSFIGSPRINATGQGVTIFYVDRLGYYPYIDSITGVTVNGGIPQKISLQDHLDKAKKDITFYMPVDNLGMAVIDWEEWRPTWARNWKPKDVYKNRSIELVQQQNVQLSLTEATEKAKQEFEKAGKDFLVETIKLGKLLRPNHLWGYYLFPDCYNHHYKKPGYNGSCFNVEIKRNDDLSWLWNESTALYPSIYLNTQQSPVAATLYVRNRVREAIRVSKIPDAKSPLPVFAYTRIVFTDQVLKFLSQDELVYTFGETVALGASGIVIWGTLSIMRSMKSCLLLDNYMETILNPYIINVTLAAKMCSQVLCQEQGVCIRKNWNSSDYLHLNPDNFAIQLEKGGKFTVRGKPTLEDLEQFSEKFYCSCYSTLSCKEKADVKDTDAVDVCIADGVCIDAFLKPPMETEEPQIFYNASPSTLS

SEQ ID NO: 3460 - protein, 5 aa, Artificial Sequence
  source: /note="Description of Artificial Sequence: Synthetic peptide"
GGGGS

SEQ ID NO: 3461 - protein, 10 aa, Artificial Sequence
  source: /note="Description of Artificial Sequence: Synthetic peptide"
GGGGSGGGGS

SEQ ID NO: 3462 - protein, 15 aa, Artificial Sequence
  source: /note="Description of Artificial Sequence: Synthetic peptide"
GGGGSGGGGSGGGGS

SEQ ID NO: 3463 - protein, 17 aa, Artificial Sequence
  source: /note="Description of Artificial Sequence: Synthetic peptide"
DVPSGPGGGGGSGGGGS

SEQ ID NO: 3464 - protein, 455 aa, Artificial Sequence; identical to SEQ ID NO: 3459
  source: /note="Description of Artificial Sequence: Synthetic polypeptide"

SEQ ID NO: 3465 - protein, 413 aa, Artificial Sequence
  source: /note="Description of Artificial Sequence: Synthetic polypeptide"
FRGPLLPNRPFTTVWNANTQWCLERHGVDVDVSVFDVVANPGQTFRGPDMTIFYSSQGTYPYYTPTGEPVFGGLPQNASLIAHLARTFQDILAAIPAPDFSGLAVIDWEAWRPRWAFNWDTKDIYRQRSRALVQAQHPDWPAPQVEAVAQDQFQGAARAWMAGTLQLGRALRPRGLWGFYGFPDCYNYDFLSPNYTGQCPSGIRAQNDQLGWLWGQSRALYPSIYMPAVLEGTGKSQMYVQHRVAEAFRVAVAAGDPNLPVLPYVQIFYDTTNHFLPLDELEHSLGESAAQGAAGVVLWVSWENTRTKESCQAIKEYMDTTLGPFILNVTSGALLCSQALCSGHGRCVRRTSHPKALLLLNPASFSIQLTPGGGPLSLRGALSLEDQAQMAVEFKCRCYPGWQAPWCERKSMW

SEQ ID NO: 3466 - protein, 551 aa, Artificial Sequence
  source: /note="Description of Artificial Sequence: Synthetic polypeptide"
YNFFPRKPKWDKNQITYRIIGYTPDLDPETVDDAFARAFQVWSDVTPLRFSRIHDGEADIMINFGRWEHGDGYPFDGKDGLLAHAFAPGTGVGGDSHFDDDELWTLGEGQVVRVKYGNADGEYCKFPFLFNGKEYNSCTDTGRSDGFLWCSTTYNFEKDGKYGFCPHEALFTMGGNAEGQPCKFPFRFQGTSYDSCTTEGRTDGYRWCGTTEDYDRDKKYGFCPETAMSTVGGNSEGAPCVFPFTFLGNKYESCTSAGRSDGKMWCATTANYDDDRKWGFCPDQGYSLFLVAAHEFGHAMGLEHSQDPGALMAPIYTYTKNFRLSQDDIKGIQELYGASPDIDLGTGPTPTLGPVTPEICKQDIVFDGIAQIRGEIFFFKDRFIWRTVTPRDKPMGPLLVATFWPELPEKIDAVYEAPQEEKAVFFAGNEYWIYSASTLERGYPKPLTSLGLPPDVQRVDAAFNWSKNKKTYIFAGDKFWRYNEVKKKMDPGFPKLIADAWNAIPDNLDAVVDLQGGGHSYFFKGAYYLKLENQSLKSVKFGSIKSDWLGC

SEQ ID NO: 3467 - protein, 14 aa, Artificial Sequence
  source: /note="Description of Artificial Sequence: Synthetic peptide"
AEAAAKEAAAKAAA

SEQ ID NO: 3468 - protein, 19 aa, Artificial Sequence
  source: /note="Description of Artificial Sequence: Synthetic peptide"
AEAAAKEAAAKEAAAKAAA

SEQ ID NO: 3469 - protein, 24 aa, Artificial Sequence
  source: /note="Description of Artificial Sequence: Synthetic peptide"
AEAAAKEAAAKEAAAKEAAAKAAA

SEQ ID NO: 3470 - protein, 29 aa, Artificial Sequence
  source: /note="Description of Artificial Sequence: Synthetic peptide"
AEAAAKEAAAKEAAAKEAAAKEAAAKAAA

SEQ ID NO: 3471 - protein, 340 aa, Artificial Sequence
  source: /note="Description of Artificial Sequence: Synthetic polypeptide"
SPGQGTQSENSCTHFPGNLPNMLRDLRDAFSRVKTFFQMKDQLDNLLLKESLLEDFKGYLGCQALSEMIQFYLEEVMPQAENQDPDIKAHVNSLGENLKTLRLRLRRCHRFLPCENKSKAVEQVKNAFNKLQEKGIYKAMSEFDIFINYIEAYMTMKIRNGGGGSGGGGSGGGGSGGGGSSPGQGTQSENSCTHFPGNLPNMLRDLRDAFSRVKTFFQMKDQLDNLLLKESLLEDFKGYLGCQALSEMIQFYLEEVMPQAENQDPDIKAHVNSLGENLKTLRLRLRRCHRFLPCENKSKAVEQVKNAFNKLQEKGIYKAMSEFDIFINYIEAYMTMKIRN

SEQ ID NO: 3472 - protein, 166 aa, Artificial Sequence
  source: /note="Description of Artificial Sequence: Synthetic polypeptide"
SPGQGTQSENSCTHFPGNLPNMLRDLRDAFSRVKTFFQMKDQLDNLLLKESLLEDFKGYLGCQALSEMIQFYLEEVMPQAENQDPDIKAHVNSLGENLKTLRLRLRRCHRFLPCENGGGSGGKSKAVEQVKNAFNKLQEKGIYKAMSEFDIFINYIEAYMTMKIRN

SEQ ID NO: 3473 - protein, 114 aa, Artificial Sequence
  source: /note="Description of Artificial Sequence: Synthetic polypeptide"
NWVNVISDLKKIEDLIQSMHIDATLYTESDVHPSCKVTAMKCFLLELQVISLASGDASIHDTVENLIILANNSLSSNGAVTESGCKECEELEEKNIKEFLQSFVHIVQMFINTS

SEQ ID NO: 3474 - protein, 10 aa, Artificial Sequence
  source: /note="Description of Artificial Sequence: Synthetic peptide"
GFNIKSAYMH

SEQ ID NO: 3475 - protein, 11 aa, Artificial Sequence
  source: /note="Description of Artificial Sequence: Synthetic peptide"
SESVDSYGNSF

SEQ ID NO: 3476 - protein, 6 aa, Artificial Sequence
  source: /note="Description of Artificial Sequence: Synthetic peptide"
SSSVSY

SEQ ID NO: 3477 - protein, 27 aa, Artificial Sequence
  source: /note="Description of Artificial Sequence: Synthetic peptide"
  SITE (2)..(26): /note="This region may encompass 2-5 'Glu Ala Ala Ala Lys' repeating units"
AEAAAKEAAAKEAAAKEAAAKEAAAKA
